(19) United States
(12) Patent Application Publication
(10) Pub. No.: US 2009/0197250 A1
(43) Pub. Date: Aug. 6, 2009

(54) METHODS AND NUCLEIC ACIDS FOR THE ANALYSIS OF GENE EXPRESSION ASSOCIATED WITH THE PROGNOSIS OF PROSTATE CELL PROLIFERATIVE DISORDERS

(75) Inventors: Susan Cottrell, Seattle, WA (US); Fabian Model, Berlin (DE); Carolina Haefliger, Basel (CH); Gunter Weiss, Berlin (DE); Juergen Distler, Berlin (DE); Andrew Z. Sledziewski, Shoreline, WA (US); Xiaoling Song, Woodinville, WA (US); Thomas L. Skillman, Kennydale, WA (US); Jeffrey G. Thomas, Emeryville, CA (US)

Correspondence Address: DAVIS WRIGHT TREMAINE, LLP/Seattle, 1201 Third Avenue, Suite 2200, SEATTLE, WA, 98101-3045, US

(73) Assignee: EPIGENOMICS AG, Berlin, DE (DE)

(21) Appl. No.: 11/720,744

(22) PCT Filed: Dec. 2, 2005
(86) PCT No.: PCT/US05/43974

§ 371 Date: Nov. 2, 2007

Related U.S. Application Data
(60) Provisional application No. 60/632,426, filed on Dec. 2, 2004.
(60) Provisional application No. 60/633,250, filed on Dec. 2, 2004.
(60) Provisional application No. 60/662,220, filed on Mar. 14, 2005.
(60) Provisional application No. 60/723,125, filed on Oct. 3, 2005.
(60) Provisional application No. 60/723,054, filed on Oct. 3, 2005.
(60) Provisional application No. 60/740,736, filed on Nov. 30, 2005.

(51) Int. Cl. C12Q 1/68; G01N 1/30; C40B 30/04; C07H 21/04

(52) U.S. Cl. 435/6; 435/40.52; 506/9; 536/23.5

(57) ABSTRACT

Particular aspects provide novel methods and compositions (e.g., nucleic acids, kits, etc.) having substantial utility for providing a prognosis of prostate cell proliferative disorders. In particular aspects, this is achieved by the analysis of the expression status of a panel of genes, or subsets thereof.

### CROSS-REFERENCE TO RELATED APPLICATIONS

[0001] This application claims the benefit of priority to U.S. Provisional Application Ser. Nos. 60/632,426, filed 2 Dec. 2004 and entitled METHODS AND NUCLEIC ACIDS FOR THE ANALYSIS OF GENE EXPRESSION ASSOCIATED WITH THE PROGNOSIS OF PROSTATE CELL PROLIFERATIVE DISORDERS; 60/662,220, filed 14 Mar. 2005 of same title; 60/723,125 filed 3 Oct. 2005 of same title; 60/______, filed Nov. 30, 2005 of same title; 60/633,250 filed 2 Dec. 2004 and entitled METHODS AND NUCLEIC ACIDS FOR THE ANALYSIS OF GENE EXPRESSION ASSOCIATED WITH THE DEVELOPMENT OF PROSTATE CELL PROLIFERATIVE DISORDERS; and 60/723,054 filed 3 Oct. 3, 2005 of same title, all of which are incorporated by reference herein in their entireties.

### FIELD OF THE INVENTION

[0002] Aspects of the present invention relate to human DNA sequences that exhibit heterogenous expression patterns in prostate cancer patients, and more particularly to novel compositions and methods for providing a prognosis of said patients.

### SEQUENCE LISTING

[0003] A Sequence Listing, pursuant to PCT Administrative Instructions Part 8, Section 801(a), has been provided on compact disc (1 of 1) as a 3.25 MB text file (476_{—}0001.txt), which is incorporated by reference herein in its entirety.

### BACKGROUND

[0004] Prostate cancer. Prostate cancer is the most common malignancy among men in the United States (˜200,000 new cases per year), and the sixth leading cause of male cancer-related deaths worldwide (˜204,000 per year). Prostate cancer is primarily a disease of the elderly, with approximately 16% of men between the ages of 60 and 79 having the disease. According to some estimates at autopsy, 80% of all men over 80 years of age have some form of prostate disease (e.g., cancer, BPH, prostatitis, etc). Benign prostate hypertrophy is present in about 50% of men aged 50 or above, and in 95% of men aged 75 or above. Prostate cancer, based on these reports, is often not a disease that men die from, but more typically—with. Recent evidence suggests that the incidence of prostate cancer may in fact be declining, likely as result of better treatment, better surgery, and earlier detection.

[0005] Diagnosis of prostate cancer; molecular approaches. Current guidelines for prostate cancer screening have been suggested by the American Cancer Society and are as follows: At 50 years of age, health care professionals should offer a blood test for prostate specific antigen (PSA) and perform a digital rectal exam (DRE). It is recommended that high risk populations, such as African Americans and those with a family history of prostate disease, should begin screening at 45 years of age. Men without abnormal prostate pathology generally have a PSA level in blood below 4 ng/ml. PSA levels between 4 ng/ml and 10 ng/ml (called the ‘Grey Zone’) have a 25% chance of having prostate cancer. The result is that 75% of the time, men with an abnormal DRE and a PSA in this grey zone have a negative, or a seemingly unnecessary biopsy. Above the grey zone, the likelihood of having prostate cancer is significant (>67%) and increases even further as PSA levels go up. Numerous methods exist for measuring PSA (percent-free PSA, PSA velocity, PSA density, etc.), and each has an associated accuracy for detecting the presence of cancer. Yet, even with the minor improvements in detection, and the reported drops in mortality associated with screening, the frequency of false positives remains high. Reduced specificity results in part from increased blood PSA associated with BPH, and prostatis. It has also been estimated that up to 45% of prostate biopsies under current guidelines are falsely negative, resulting in decreased sensitivity even with biopsy.

[0006] TRUS guided biopsy is considered the ‘gold standard’ for diagnosing prostate cancer. Recommendations for biopsy are based upon abnormal PSA levels and or an abnormal DREs. For PSA there is a grey zone where a high percentage of biopsies are perhaps not necessary. Yet the ability to detect cancer in this grey zone (PSA levels of 4.0 to 10 ng/ml) is difficult without biopsy. Due to this lack of specificity, 75% of men undergoing a biopsy do not have cancer. Yet without biopsy, those with cancer would be missed, resulting in increased morbidity and mortality. Unfortunately, the risks associated with an unnecessary biopsy are also high.

[0007] Molecular markers would offer the advantage that they can be used to efficiently analyze even very small tissue samples, and samples whose tissue architecture has not been maintained. Within the last decade, numerous genes have been studied with respect to differential expression among benign hyperplasia of the prostate and different grades of prostate cancer. However, no single marker has as yet been shown to be sufficient for the prognostic classification of prostate tumors in a clinical setting.

[0008] Alternatively, high-dimensional mRNA-based approaches may, in particular instances, provide a means to distinguish between different tumor types and benign and malignant lesions. However, application of such approaches as a routine diagnostic tool in a clinical environment is impeded and substantially limited by the extreme instability of mRNA, the rapidly occurring expression changes following certain triggers (e.g., sample collection), and, most importantly, by the large amount of mRNA needed for analysis which often cannot be obtained from a routine biopsy (see, e.g., Lipshutz, R. J. et al., Nature Genetics 21:20-24, 1999; Bowtell, D. D. L. Nature Genetics Suppl. 21:2532, 1999).

[0009] Aberrant genetic methylation in prostate cancer has been observed in several genes including GSTPi, AR, p16 (CDKN2a/INK4a), CD44, CDH1. Genome-wide hypomethylation for example of the LINE-1 repetitive element has also been associated with tumor progression (Santourlidis, S., et al., Prostate 39:166-74, 1999).

[0010] Prostate Cancer Treatment Options. There are many treatment strategies available to patients diagnosed with prostate cancer, and the decision for the patients and physicians is often unclear. Because prostate cancer can be a slowly developing disease, many men choose a treatment approach called watchful waiting, or conservative management. As the names imply, this approach does not include any radical therapy intended to cure the patient. Instead, the disease is carefully monitored using PSA tests and DREs. The ideal patient for this approach is one whose tumor is slow growing and non-invasive, and who is therefore likely to die of other causes before the prostate cancer becomes problematic.

[0011] For younger patients with localized disease, curative treatment is more appropriate. Radical prostatectomy is used to remove the prostate and hopefully all traces of the tumor. The surgical margins, seminal vesicles, and sometimes lymph nodes are tested for the presence of cancer, and in each case the presence of cancer correlates with reduced disease free survival Overall, about 70% of men remain free of disease ten years after surgery (Roehl, et al., 2004). Radical prostatectomy is a significant surgery, with side effects including blood loss, incontinence, and impotence. The rate of intraoperative and postoperative complications is estimated to be less than 2% (Lepor, et al., 2001).

[0012] Radiation therapy is also used to attempt to cure prostate cancer patients. Patients can choose either external beam radiation or brachytherapy (radioactive seed implants). The rates of survival and the side effects are similar to radical prostatectomy (D'amico, et al., 1998). For both radical prostatectomy and radiation therapy, the probability of survival is highly dependent on the stage and differentiation of the tumor. Localized indolent tumors are more likely to be cured.

[0013] Hormonal therapy is often used for patients whose cancer has spread beyond the prostate or for patients whose cancer has recurred after prostatectomy or radiation therapy. In other words, hormonal therapy is used to control cancer but not to cure it. Hormonal therapy is sometimes used in conjunction with other therapies such as radiation or as a neo-adjuvant therapy prior to surgery. The goal of hormonal therapy is to reduce the stimulatory effect of androgens on the prostate tumor. The reduction in hormones is achieved through orchiectomy, lutenizing hormone-releasing hormone (LHRH) analogs, and antiandrogens. Side effects of hormonal therapy can include impotence, hot flashes, fatigue, and reduced libido. Eventually, prostate tumors become insensitive to androgens and hormonal therapy is no longer effective.

[0014] After the tumor has spread outside the capsule and hormonal therapy has failed, chemotherapy can be used to relieve pain or delay the progression of the disease. The response to chemotherapy is variable, and lives are extended for only a minority of patients. Bisphosphonates are used to reduce the osteolytic activity of tumors metastasised to the bones.

[0015] Prostate Cancer Prognosis Estimation. DRE, TRUS, biopsy, and PSA provide initial staging information on the tumor, but MRI, CT scans, ProstaScint scans and bone scans are used to determine the spread of the cancer beyond the prostatic capsule. These tests are not used on every prostate cancer patient, but only those with some likelihood of metastases. If metastases can be confirmed, the patient will receive treatment designed to slow the progression of the disease. If no metastases are detected, a patient is a candidate for potentially curative treatments such as prostatectomy and radiation therapy. Prior to the removal of the prostate, lymph nodes are sometimes dissected as a final test for metastases. If metastases are present in the dissected nodes, the surgery may be aborted. Analysis of the tissue surgically removed during prostatectomy is the final and gold standard staging technique for those patients who choose to undergo surgery. Frequently, analysis of the surgical specimens shows that the patient was originally understaged by the diagnostic tests (Bostwick, 1997).

[0016] An accurate estimation of prognosis is crucial for selection of the most appropriate treatment for each patient. Since organ confined prostate cancer cannot lead to death, estimation of prognosis is also an estimation of the presence or likelihood of development of metastases. A patient who is likely to develop cancer outside of the prostatic capsule will receive more extensive diagnostic work-up, including MRI and CT scans, and possibly more radical treatments, including surgery and radiation.

[0017] An initial prognostic assessment is made from the results of a PSA test, DRE, and biopsy analysis. The size, location, and method of detection of the tumor are combined to give a staging score on the TNM scale. Patients with higher stage tumors and high PSA values are more likely to have cancer that has spread or will spread outside of the prostate. A histological analysis of the biopsy allows a pathologist to determine the Gleason score. The Gleason score is a composite of the two most prevalent grades in the tissue sample, and the grades can range between one and five. A higher grade indicates more extreme dedifferentiation, and higher composite scores correlate with higher probability for metastasis and reduced disease free survival.

[0018] Prostate cancer nomograms have been developed and modified to predict the risk of cancer recurrence after primary therapy based on PSA levels, Gleason grading, and pre-operative staging information (Kattan et al 2003; Kattan et al 1998; Potter et al 2001). The data is derived from actual patient survival rates in cohorts of thousands of patients at multiple institutions. As with all prognostic measurements in prostate cancer, the estimate of recurrence risk by the nomogram is also an estimate of the likelihood of presence of cancer outside the prostatic capsule. Because the clinical characteristics of the cancers that patients are presenting with have changed with the widespread use of PSA, the nomograms are out of date and are not widely used. However, the general process of integrating Gleason, stage, and PSA information is still used.

[0019] Patients with cancer that has spread to lymph nodes or other metastatic sites are treated with systemic therapies such as hormonal therapies. Patients with localized disease (T1-T3) are candidates for definitive, curative treatments such as surgery or radiation. Those patients with localized disease who are thought to be low-risk are ideal candidates for watchful waiting. Those with intermediate risk are ideal for monotherapy such as surgery or radiation. Those with high risk localized disease should be considered for multimodal therapies or clinical trials.

[0020] After surgery, more prognostic information is available because the tumor spread can be directly analyzed. During some prostatectomies, the lymph nodes are directly dissected and the nodal status is confirmed. In all surgeries, the tumor spread to the seminal vesicles and the margin status are checked. Positive nodes, seminal vesicles, and margins all indicate an inferior prognosis and may suggest that the patient should receive adjuvant treatment.

[0021] Molecular prostate cancer prognostic markers; deficiencies of prior art approaches. As an alternative to current approaches to the prognostic classification of prostate carcinoma patients a variety of molecular approaches are currently being explored. It is anticipated that the development of suitable molecular markers will have significant advantages over current approaches in terms of accuracy, cost-effectiveness and/or patient invasiveness. A variety of molecular markers have been discovered including monoclonal antibodies. In a study by Xu et al (ICDB/95613763) 114 cases of prostate cancer showed that 57% of the bone marrow specimens had elevated OVX1 levels (greater than 7.2 U/ml). In other experiments, OVX1 levels were about 2-fold higher in serum samples from androgen-independent than from androgen-dependent prostate cancer patients (p less than 0.001), suggesting that serum OVX1 levels may be able to predict the progression of prostate cancer, since this disease when it progresses typically becomes androgen-independent. Expression of the PSCA protein and mRNA has been positively correlated with adverse tumor characteristics, such as increasing pathological grade (poor cell differentiation), worsening clinical stage and androgen-independence and speculatively with prostate carcinogenesis (Jpn J Clin Oncol, 4:414-9, 2004). Other prospective mRNA analysis markers include Hepsin. Expression of Hepsin showed significant difference between patients at lower risk (pT2, G2 and Gleason score less than 7) and higher risk (pT3/4, G3 and Gleason score 7 or greater) for relapse (J Urol, 171:187-91, 2004).

[0022] The GSTPi gene is the most well characterized prostate carcinoma diagnostic marker. Zhou et al. (J Urol, 171:2195-8, 2004) recently correlated expression of the GSTPi gene with Gleason grade and cancer volume. Furthermore, use of the gene GSTPi as a marker for the detection of prostate carcinomas located in the peripheral zone (i.e., with a high likelihood of metastasis) has also been described in U.S. patent application Ser. No. 10/350,763, which is hereby incorporated by reference in its entirety.

[0023] Another methylation marker which may be suitable for the prognostic classification of prostate carcinomas is uPA. Rabbani et al. (The FASEB Journal 17:1081-1088, 2003) have shown that the uPA promoter is hypermethylated in hormone-responsive PrEC and LNCaP cells and hypomethylated in hormone-insensitive PC-3 cells. De-methylation of the promoter in the LNCaP cell lines resulted in increase of mRNA analysis and resulted in an increase in the invasive capacity. Singal et al., analysed methylation of a gene panel consisting of glutathione s-transferase Pi1 (GSTP1), retinoic acid receptor beta (RARB), CD44, E-cadherin (ECAD) and RAS association domain family protein 1A (RASSF1A) in prostate cancer. A methylation index (MI) was calculated as the total number of genes methylated, higher MI was noted in stage III as compared to stage II disease, and in Gleason score 7 as compared to Gleason score 6 samples. Singal et al. thus concluded that the results suggest that the methylation of the gene panel in correlated with clinicopathological features of poor prognosis.

[0024] Pronounced need in the art. Significantly, however, none of the heretofore mentioned markers are sufficiently developed to provide a marker for the prognosis of prostate cell proliferative disorders that is sufficiently robust and/or accurate for effective use in a clinical setting.

[0025] While accurate diagnosis of prostate carcinoma is important, the most pressing need in prostate cancer treatment is for information to guide the treatment planning decision. Leaders in the field agree that many patients with clinically insignificant disease receive unnecessary radical treatments such as prostatectomy or radiation therapy. However, twenty percent of patients who do receive these curative treatments experience disease recurrence. A molecular test could help select patients for the optimal treatment choice and thereby reduce over and under treatment

[0026] Currently the therapy choice is made based on the likelihood of spread of the disease. Low-risk patients are candidates for watchful waiting. Medium and high risk patients should receive surgery or radiation, and the high risk patients are candidates for additional adjuvant treatments. Staging, Gleason, and PSA are currently used to estimate this risk, but the combined information from these tests is insufficient. Very few patients are recommended for watchful waiting because clinicians cannot be sure which cancers are indolent. Furthermore, many patients who receive monotherapy experience a recurrence.

[0027] Gleason grading currently plays a primary role in prognostic assessment. Patients with localized disease and high Gleason scores (8-10) always undergo radical treatments. Patients with low Gleason scores (2-5) have the option of deferring curative treatment and opting for watchful waiting, however many chose to undergo curative therapy soon after diagnosis. For patients with mid-range Gleason scores, which is the majority of patients diagnosed today, clinicians must use other less-reliable prognostic indicators for further information.

[0028] Accordingly there is a pronounced need in the art for a novel, effective prognostic test, and in particular one that would predict the probability that a cancer has or is likely to spread outside of the prostate based on the methylation patterns of biopsy samples. This type of information is highly valuable in the diagnostic and treatment planning processes. This information would initially be used in reaching the decision about whether imaging tests are necessary to check for metastasis for a complete diagnostic work-up. Surgery is unnecessary for any patient whose cancer has already spread, but if a patient is not selected for imaging the metastases will not be detected until surgery or later.

[0029] Furthermore there is a pronounced need in the art for a novel and effective prostate cell proliferative disorder molecular classification test, and in particular one that would be suitable for the analysis of biopsy samples to improve the stratification of patients into low, intermediate, and high risk categories so that optimal treatment plans can be selected for each patient. With accurate stratification, patients and doctors can choose watchful waiting with confidence that there is little risk for early recurrence. This test would therefore reduce the number of unnecessary surgeries and radiation treatments.

[0030] Additionally, with improved estimations of which patients are likely to recur with monotherapy, physicians can make better use of available adjuvant treatments. If a patient chooses to undergo surgery, the test can be repeated on prostatectomy samples to verify the assessment of his need for adjuvant therapy. The benefits of different adjuvant therapy approaches are still being worked out in clinical trials, and a molecular test could provide valuable information to stratify patients for this additional treatment or for clinical trials.

[0031] PITX2 (Paired-like homeodomain transcription factor 2), also known as PTX2, RIEG1, or ARP1, encodes a member of the RIEG/PITX homeobox family, which is in the bicoid class of homeodomain proteins. PITX2 encodes several alternative transcripts, and mutations in the gene lead to the autosomal-dominant disorder Rieger's syndrome, a developmental disorder predominantly affecting the eye (Semina et al., 1996). The protein acts as a transcription factor and is involved in the development of several major organs. It is induced by the WNT pathway, and mediates cell-type specific proliferation by inducing growth-regulating genes (Kioussi et al. 2002).

[0032] Toyota et al. (2001) found hypermethylation of the gene in a large proportion of acute myeloid leukemias. Several studies by the applicant (see WO 2005/059172) have demonstrated that hypermethylation of PITX2 is associated with poor prognosis for breast cancer patients.

[0033] The GPR7 marker is located in a CpG island in the promoter region of an intronless gene on chromosome 10. GPR7, or G-protein receptor 7, is a receptor for neuropeptide W and neuropeptide B (Shimomura et al. 2002; Tanaka et al. 2003). The expression of GPR7 has been studied in the brain, and is expressed mainly in the cerebellum and frontal cortex (O'Dowd et al. 1995). Ishii et al. (2003) studied the phenotype of mice lacking a functional copy of GPR7. The mice developed adult-onset obesity and metabolic defects such as decreased energy expenditure and increased blood levels of glucose and insulin. Interestingly, these phenotypes were only detected in male mice. The GPR7 ligands, neuropeptides W and B, have also been implicated in metabolism and obesity in separate studies (Samson et al. 2004; Levine et al. 2005). GPR7, which is similar in sequence to opioid receptors, may also have a role in pain signaling (Zaratin et al., 2005).

[0034] SEQ ID NO: 63 is located within the regulatory region of HIST2H2BF on chromosome 1 in a region with several histone genes. The histone content and status of chromatin can influence the expression of the encoded gene. Methylation and altered expression of a histone gene in prostate cancer could cause chromatin changes throughout the genome that alter gene expression in ways that result in more aggressive tumor properties. There are no published articles on the function of this particular histone.

[0035] The marker referred to as SEQ ID NO: 35 is located on chromosome 3 downstream of the FOXL2 (Forkhead transcription factor) gene and within or near predicted genes or ESTs. Although it is downstream, it is anticipated that methylation of this marker effects the expression of FOXL2, which is mutated in the blepharophimosis-ptosis epicanthus inversus syndrome (BPES). This syndrome is characterized by eye, craniofacial, and ovarian abnormalities. Methylation of the marker may also affect the expression of the EST, or the EST may be shown to be an alternative exon for the FOXL2 gene.

### SUMMARY OF THE INVENTION

[0036] The present invention provides novel and efficacious methods and nucleic acids for providing a prognosis of prostate cell proliferative disorders.

[0037] The invention solves this longstanding need in the art by providing genes, genomic sequences and/or regulatory regions thereof according to Table 11 (or to one or more of those), the expression thereof being indicative of the prognosis of prostate cell proliferative disorders or features thereof. It is particularly preferred that said genes, genomic sequences and/or regulatory regions are selected from the group consisting PITX2, SEQ ID NO: 63, GPR7 and SEQ ID NO: 35. Further preferred is the gene PITX2. In a particularly preferred embodiment of the invention, the methylation status of CpG positions of genes, genomic sequences and/or regulatory regions thereof according to Table 11 (or to one or more of those) is indicative of the prognosis of prostate cell proliferative disorders or features thereof. It is particularly preferred that said genes, genomic sequences and/or regulatory regions are selected from the group consisting PITX2, SEQ ID NO: 63, GPR7 and SEQ ID NO: 35. Further preferred is the gene PITX2. It is particularly preferred that said prostate cell proliferative disorder is a prostate carcinoma or prostate neoplasm.

[0038] To enable this analysis the invention provides a method for the analysis of biological samples for genomic methylation associated with the development of prostate cell proliferative disorders. Said method is characterised in that at least one nucleic acid, or a fragment thereof, from the group consisting of SEQ ID NO:1 to SEQ ID NO:64 and SEQ ID NO: 961 (preferably SEQ ID Nos: 35, 63, 19 and most preferably SEQ ID NO: 961) is/are contacted with a reagent or series of reagents capable of distinguishing between methylated and non methylated CpG dinucleotides within the genomic sequence, or sequences of interest.

[0039] It is particularly preferred that the method and nucleic acids according to the invention are utilised for at least one of: prognosis of; treatment of; monitoring of; and treatment and monitoring of prostate cell proliferative disorders.

[0040] The present invention provides a method for ascertaining genetic and/or epigenetic parameters of genomic DNA. The method has utility for the improved prognostic classification of prostate cell proliferative disorders, more specifically by enabling the improved identification of and differentiation between aggressive and non-aggressive forms of said disorder. The invention presents several substantial improvements over the state of the art. Although some methylation assays for the detection of cancer are known, there is currently no molecular classification system for the prognostic classification of tumours.

[0041] The DNA source may be any suitable source. Preferably, the source of the DNA sample is selected from the group consisting of cells or cell lines, histological slides, biopsies, paraffin-embedded tissue, bodily fluids, ejaculate, urine, blood, and combinations thereof. Preferably, the source is biopsies, bodily fluids, ejaculate, urine, or blood.

[0042] Specifically, the present invention provides a method for providing a prognosis of prostate cell proliferative disorders, comprising: obtaining a biological sample comprising genomic nucleic acid(s); contacting the nucleic acid(s), or a fragment thereof, with one reagent or a plurality of reagents sufficient for distinguishing between methylated and non methylated CpG dinucleotide sequences within a target sequence of the subject nucleic acid, wherein the target sequence comprises, or hybridizes under stringent conditions to, a sequence comprising at least 16 contiguous nucleotides of SEQ ID NO:1 to SEQ ID NO:64 and SEQ ID NO: 961, (preferably SEQ ID Nos: 35, 63, 19 and most preferably SEQ ID NO: 961) said contiguous nucleotides comprising at least one CpG dinucleotide sequence; and determining, based at least in part on said distinguishing, the methylation state of at least one target CpG dinucleotide sequence, or an average, or a value reflecting an average methylation state of a plurality of target CpG dinucleotide sequences. Preferably, distinguishing between methylated and non methylated CpG dinucleotide sequences within the target sequence comprises methylation state-dependent conversion or non-conversion of at least one such CpG dinucleotide sequence to the corresponding converted or non-converted dinucleotide sequence within a sequence selected from the group consisting of SEQ ID NO:65 to SEQ ID NO:320 and SEQ ID NO: 962 to SEQ ID NO: 965, and contiguous regions thereof corresponding to the target sequence. Preferably said sequence is selected from the group consisting of SEQ ID Nos: 133, 134, 261, 262, 189, 190, 317, 318, 101, 102, 229, 230 and most preferably said sequence is selected from the group consisting of SEQ ID Nos: 962-965

[0043] Additional embodiments provide a method for providing a prognosis of prostate cell proliferative disorders, comprising: obtaining a biological sample having subject genomic DNA; extracting the genomic DNA; treating the genomic DNA, or a fragment thereof, with, one or more reagents to convert 5-position unmethylated cytosine bases to uracil or to another base that is detectably dissimilar to cytosine in terms of hybridization properties; contacting the treated genomic DNA, or the treated fragment thereof, with an amplification enzyme and at least two primers comprising, in each case a contiguous sequence at least 9 nucleotides in length that is complementary to, or hybridizes under moderately stringent or stringent conditions to a sequence selected from the group consisting SEQ ID NO:65 to SEQ ID NO:320 and SEQ ID NO: 962 to SEQ ID NO: 965 (preferably said group consists of SEQ ID Nos: 133, 134, 261, 262, 189, 190, 317, 318, 101, 102, 229, 230 and most preferably said group consists of SEQ ID Nos: 962-965) and complements thereof, wherein the treated DNA or the fragment thereof is either amplified to produce an amplificate, or is not amplified; and determining, based on a presence or absence of, or on a property of said amplificate, the methylation state of at least one CpG dinucleotide sequence selected from the group consisting of SEQ ID NO:1 to SEQ ID NO:64 and SEQ ID NO: 961 (preferably said group consists of SEQ ID Nos: 35, 63, 19 and most preferably is SEQ ID NO: 961), or an average, or a value reflecting an average methylation state of a plurality of CpG dinucleotide sequences thereof.

[0044] Preferably, at least one such hybridizing nucleic acid molecule or peptide nucleic acid molecule is bound to a solid phase. Preferably, determining comprises use of at least one method selected from the group consisting of: hybridizing at least one nucleic acid molecule comprising a contiguous sequence at least 9 nucleotides in length that is complementary to, or hybridizes under moderately stringent or stringent conditions to a sequence selected from the group consisting of SEQ ID NO:65 to SEQ ID NO:320, (preferably said group consists of SEQ ID Nos: 133, 134, 261, 262, 189, 190, 317, 318, 101, 102, 229, 230 and most preferably said group consists of SEQ ID Nos: 962-965) and complements thereof; hybridizing at least one nucleic acid molecule, bound to a solid phase, comprising a contiguous sequence at least 9 nucleotides in length that is complementary to, or hybridizes under moderately stringent or stringent conditions to a sequence selected from the group consisting of SEQ ID NO:65 to SEQ ID NO:320 and SEQ ID NO: 962 to SEQ ID NO: 965, (preferably said group consists of SEQ ID Nos: 133, 134, 261, 262, 189, 190, 317, 318, 101, 102, 229, 230 and most preferably said group consists of SEQ ID Nos: 962-965), and complements thereof; hybridizing at least one nucleic acid molecule comprising a contiguous sequence at least 9 nucleotides in length that is complementary to, or hybridizes under moderately stringent or stringent conditions to a sequence selected from the group consisting of SEQ ID NO:65 to SEQ ID NO:320 and SEQ ID NO: 962 to SEQ ID NO: 965 (preferably said group consists of SEQ ID Nos: 133, 134, 261, 262, 189, 190, 317, 318, 101, 102, 229, 230 and most preferably said group consists of SEQ ID Nos: 962-965), and complements thereof, and extending at least one such hybridized nucleic acid molecule by at least one nucleotide base; and sequencing of the amplificate.

[0045] Further embodiments provide a method for providing a prognosis of prostate cell proliferative disorders, comprising: obtaining a biological sample having subject genomic DNA; extracting the genomic DNA; contacting the genomic DNA, or a fragment thereof, comprising one or more sequences selected from the group consisting of SEQ ID NO:1 to SEQ ID NO:64 and SEQ ID NO: 961 (preferably said group consists of SEQ ID Nos: 35, 63, 19 and most preferably said sequence is SEQ ID NO: 961) or a sequence that hybridizes under stringent conditions thereto, with one or more methylation-sensitive restriction enzymes, wherein the genomic DNA is either digested thereby to produce digestion fragments, or is not digested thereby; and determining, based on a presence or absence of, or on property of at least one such fragment, the methylation state of at least one CpG dinucleotide sequence of one or more sequences selected from the group consisting of SEQ ID NO:1 to SEQ ID NO:64 and SEQ ID NO: 961, or an average, or a value reflecting an average methylation state of a plurality of CpG dinucleotide sequences thereof. Preferably said group consists of SEQ ID Nos: 35, 63, 19 and most preferably said sequence is SEQ ID NO: 961. Preferably, the digested or undigested genomic DNA is amplified prior to said determining.

[0046] Additional embodiments provide novel genomic and chemically modified nucleic acid sequences, as well as oligonucleotides and/or PNA-oligomers for analysis of cytosine methylation patterns within sequences from the group consisting of SEQ ID NO:1 to SEQ ID NO:64 and SEQ ID NO: 961.

### BRIEF DESCRIPTION OF THE DRAWINGS

[0047] FIG. 1 shows a ROC plot for a SEQ ID NO:19 MSP assay run on 26 frozen radical prostatectomy samples from patients with early PSA recurrence, and on 30 samples from patients with no PSA recurrence after at least 48 months.

[0048] FIG. 2 shows a ROC plot for a SEQ ID NO:35 MSP assay run on 26 frozen radical prostatectomy samples from patients with early PSA recurrence and 30 samples from patients with no PSA recurrence after at least 48 months.

[0049] FIG. 3 shows a ROC plot for a SEQ ID NO: 37 MSP assay run on 26 frozen radical prostatectomy samples from patients with early PSA recurrence and 30 samples from patients with no PSA recurrence after at least 48 months.

[0050] FIG. 4 shows a ROC plot for a SEQ ID NO: 7 MSP assay run on 26 frozen radical prostatectomy samples from patients with early PSA recurrence and 30 samples from patients with no PSA-recurrence after at least 48 months.

[0051] FIG. 5 shows a ROC plot for a SEQ ID NO: 63 MSP assay run on 26 frozen radical prostatectomy samples from patients with early PSA recurrence and 30 samples from patients with no PSA recurrence after at least 48 months.

[0052] FIG. 6 shows a ROC plot for a SEQ ID NO: 8 MSP assay run on 26 frozen radical prostatectomy samples from patients with early PSA recurrence and 30 samples from patients with no PSA recurrence after at least 48 months.

[0053] FIG. 7 shows a ROC plot for a SEQ ID NO: 64 MSP assay run on 26 frozen radical prostatectomy samples from patients with early PSA recurrence and 30 samples from patients with no PSA recurrence after at least 48 months.

[0054] FIG. 8 shows a gel electrophoresis analysis on 12 DNA samples. 200 ng per DNA was applied to a 0.8% agarose gel. The gel was run for 4 hours at 80 Volt. The size marker (Invitrogen, No.: 10496-016) contains the following fragments: 10.000 bp, 6.000 bp.

[0055] FIG. 9 shows ALF Express analyses of multiplex PCR products (8plex, mPCR SetD2) compared to single PCR products (sPCR Set D2). The size standard (lanes 1,4) contained fragments of the following lengths: 50, 100, 150, 200, 250, 300, 350, 400, 450, 500 bp. All fragments could be amplified. An undesired side product (220 bp) was observed.

[0056] FIG. 10 shows performance of multiplex PCR. Lane 1:100 bp marker. Lanes 2-11: multiplex PCR performance of 10 test samples, lane 12: positive control, lane 13: H2O control.

[0057] FIG. 11 shows Tumor vs. Lymphocyte samples, ranked by Wilcoxon statistics. Bonferroni corrected p-values (upper) and AUCs (lower) are shown to the right of the data matrix. Each column represents one sample; each row one oligonucleotide. Oligonucleotides are grouped per marker candidate. The indicated markers are ordered from top to bottom with increasing AUC. On the right side of each marker Bonferroni corrected Wilcoxon p-value and AUC are given. Below the AUC sensitivity at a specificity of ˜0.75 are given enclosed in brackets. Methylation data are centered and normalized to one standard deviation for individual oligonucleotides. The color represents the relative distance of the oligonucleotide methylation status from the mean value. Light grey represents hypomethylated CpGs within an oligonucleotide while dark grey indicates hypermethylated CpGs within an oligonucleotide.

[0058] FIG. 12 shows high Gleason vs. Low Gleason marker rankings. The plot displays uncorrected p-values from the genewise Wilcoxon rank statistics analysis. Lower and upper dotted lines show 5% Bonferroni and FDR limits, respectively.

[0059] FIG. 13 shows high Gleason vs. Low Gleason methylation matrix of the 10 markers with best AUC. Gleason scores are shown above each group of samples. Each column represents one sample; each row one oligonucleotide (1, 2, or 3 CpG sites each). Oligonucleotides are grouped per marker candidate. The indicated markers are ordered from top to bottom with increasing AUC. On the right side of each marker Bonferroni corrected Wilcoxon p-value and AUC are given. Below the AUC sensitivity at a specificity of ˜0.75 are given enclosed in brackets: Methylation data are centered and normalized to one standard deviation for individual oligonucleotides. The color represents the relative distance of the oligonucleotide methylation status from the mean value. Light grey represents hypomethylated CpGs within an oligonucleotide while dark grey indicates hypermethylated CpGs within an oligonucleotide.

[0060] FIG. 14 shows Early Recurrence vs. No recurrence marker rankings. The plot gives uncorrected p-values from the genewise Wilcoxon rank test analysis. Lower and upper dotted lines show 5% Bonferroni and FDR limits, respectively.

[0061] FIG. 15 shows Early Recurrence vs. No recurrence methylation matrix of the 10 markers with best AUC. Each column represents one sample; each row one oligonucleotide (1, 2, or 3 CpG sites each). Oligonucleotides are grouped per marker candidate. The indicated markers are ordered from top to bottom with increasing AUC. On the right side of each marker Bonferroni corrected Wilcoxon p-value and AUC are given. Below the AUC sensitivity at a specificity of ˜0.75 are given enclosed in brackets. Methylation data are centered and normalized to one standard deviation for individual oligonucleotides. The color represents the relative distance of the oligonucleotide methylation status from the mean value. Light grey represents hypomethylated CpGs within an oligonucleotide while dark grey indicates hypermethylated CpGs within an oligonucleotide.

[0062] For FIGS. 16-88, each figure shows the sequence of the analysed amplificate of each respective SEQ ID NO. In each figure, an analyzed amplificate is displayed in a ‘wrapped’ series of panels, where the first row (top row) in each panel shows the genomic sequence being amplified (the genomic sequence row), and where forward and reverse amplification primers (defining an ‘amplicon’) are shown in the panel row (the primer display row) immediately below the first row. The row below the primer display row (or, in panels not displaying a primer, the row below the genomic display row) is the bisulfite converted sequence of the amplificate (the bisulfite converted sequence row; wherein CpG positions are marked red). The remaining rows displayed in some panels, show the sequences of detection oligonucleotides (CG and TG oligos) used to analyze the amplificate.

[0063] FIG. 16 shows an Amplificate of SEQ ID NO:14.

[0064] FIG. 17 shows an Amplificate of SEQ ID NO:15.

[0065] FIG. 18 shows an Amplificate of SEQ ID NO:16.

[0066] FIG. 19 shows an Amplificate of SEQ ID NO:17.

[0067] FIG. 20 shows an Amplificate of SEQ ID NO:18

[0068] FIG. 21 shows an Amplificate of SEQ ID NO:19

[0069] FIG. 22 shows an Amplificate of SEQ ID NO:20

[0070] FIG. 23 shows an Amplificate of SEQ ID NO:21

[0071] FIG. 24 shows an Amplificate of SEQ ID NO:22

[0072] FIG. 25 shows an Amplificate of SEQ ID NO:23

[0073] FIG. 26 shows an Amplificate of SEQ ID NO:24

[0074] FIG. 27 shows an Amplificate of SEQ ID NO:25

[0075] FIG. 28 shows an Amplificate of SEQ ID NO:26

[0076] FIG. 29 shows an Amplificate of SEQ ID NO:27

[0077] FIG. 30 shows an Amplificate of SEQ ID NO:28

[0078] FIG. 31 shows an Amplificate of SEQ ID NO:29

[0079] FIG. 32 shows an Amplificate of SEQ ID NO:30

[0080] FIG. 33 shows an Amplificate of SEQ ID NO:31

[0081] FIG. 34 shows an Amplificate of SEQ ID NO:32 (amplificate A)

[0082] FIG. 35 shows an Amplificate of SEQ ID NO:32 (amplificate B)

[0083] FIG. 36 shows an Amplificate of SEQ ID NO:33

[0084] FIG. 37 shows an Amplificate of SEQ ID NO:34

[0085] FIG. 38 shows an Amplificate of SEQ ID NO:35

[0086] FIG. 39 shows an Amplificate of SEQ ID NO:13

[0087] FIG. 40 shows an Amplificate of SEQ ID NO:36

[0088] FIG. 41 shows an Amplificate of SEQ ID NO:37

[0089] FIG. 42 shows an Amplificate of SEQ ID NO:1

[0090] FIG. 43 shows an Amplificate of SEQ ID NO:2

[0091] FIG. 44 shows an Amplificate of SEQ ID NO:3

[0092] FIG. 45 shows an Amplificate of SEQ ID NO:4

[0093] FIG. 46 shows an Amplificate of SEQ ID NO:5

[0094] FIG. 47 shows an Amplificate of SEQ ID NO:6

[0095] FIG. 48 shows an Amplificate of SEQ ID NO:7

[0096] FIG. 49 shows an Amplificate of SEQ ID NO:38

[0097] FIG. 50 shows an Amplificate of SEQ ID NO:39

[0098] FIG. 60 shows an Amplificate of SEQ ID NO:40

[0099] FIG. 61 shows an Amplificate of SEQ ID NO:41

[0100] FIG. 62 shows an Amplificate of SEQ ID NO:42

[0101] FIG. 63 shows an Amplificate of SEQ ID NO:43

[0102] FIG. 64 shows an Amplificate of SEQ ID NO:44

[0103] FIG. 65 shows an Amplificate of SEQ ID NO:45

[0104] FIG. 66 shows an Amplificate of SEQ ID NO:46

[0105] FIG. 67 shows an Amplificate of SEQ ID NO:47

[0106] FIG. 68 shows an Amplificate of SEQ ID NO:48

[0107] FIG. 69 shows an Amplificate of SEQ ID NO:49

[0108] FIG. 70 shows an Amplificate of SEQ ID NO:50

[0109] FIG. 71 shows an Amplificate of SEQ ID NO:51

[0110] FIG. 72 shows an Amplificate of SEQ ID NO:52

[0111] FIG. 73 shows an Amplificate of SEQ ID NO:53

[0112] FIG. 74 shows an Amplificate of SEQ ID NO:54

[0113] FIG. 75 shows an Amplificate of SEQ ID NO:55

[0114] FIG. 76 shows an Amplificate of SEQ ID NO:56

[0115] FIG. 77 shows an Amplificate of SEQ ID NO:57

[0116] FIG. 78 shows an Amplificate of SEQ ID NO:58

[0117] FIG. 79 shows an Amplificate of SEQ ID NO:59

[0118] FIG. 80 shows an Amplificate of SEQ ID NO:60

[0119] FIG. 81 shows an Amplificate of SEQ ID NO:61

[0120] FIG. 82 shows an Amplificate of SEQ ID NO:62

[0121] FIG. 83 shows an Amplificate of SEQ ID NO:8

[0122] FIG. 84 shows an Amplificate of SEQ ID NO:9

[0123] FIG. 85 shows an Amplificate of SEQ ID NO:10

[0124] FIG. 86 shows an Amplificate of SEQ ID NO:11

[0125] FIG. 87 shows an Amplificate of SEQ ID NO:12 (amplificate A)

[0126] FIG. 88 shows an Amplificate of SEQ ID NO:12 (amplificate B)

[0127] FIG. 89 shows the distribution of follow up times of patients as analysed in Example 5. The white bars represent the distribution of all censored (no PSA relapse) patients. The grey bars show the distribution of the PSA-free survival time for all of the relapse patients. Frequency is shown on the Y-axis and time (months) is shown on the X-axis.

[0128] FIG. 90 shows Kaplan-Meier survival analysis of the PITX2 marker (A & B) and ROC curve analysis (C) of the marker PITX2 in differentiating between prostate cancer patients according to Example 5. Proportion of recurrence-free patients is shown on the Y-axis, time in years is shown on the x-axis.

[0129] FIG. 91 shows Kaplan-Meier survival analysis of the GPR7 marker (A & B) and ROC curve analysis (C) of the marker PITX2 in differentiating between prostate cancer patients according to Example 5. Proportion of recurrence-free patients is shown on the Y-axis, time in years is shown on the x-axis.

[0130] FIG. 92 shows Kaplan-Meier survival analysis of the SEQ ID NO: 63 marker (A & B) and ROC curve analysis (C) of the marker PITX2 in differentiating between prostate cancer patients according to Example 5. Proportion of recurrence-free patients is shown on the Y-axis, time in years is shown on the x-axis.

[0131] FIG. 93 shows Kaplan-Meier survival analysis of the SEQ ID NO: 35 marker (A & B) and ROC curve analysis (C) of the marker PITX2 in differentiating between prostate cancer patients according to Example 5. Proportion of recurrence-free patients is shown on the Y-axis, time in years is shown on the x-axis.

[0132] FIG. 94 shows Kaplan-Meier survival analysis of the ABHD9 marker (A & B) and ROC curve analysis (C) of the marker PITX2 in differentiating between prostate cancer patients according to Example 5. Proportion of recurrence-free patients is shown on the Y-axis, time in years is shown on the x-axis.

[0133] FIG. 95 shows Kaplan-Meier survival analysis of the CCND2 marker (A & B) and ROC curve analysis (C) of the marker PITX2 in differentiating between prostate cancer patients according to Example 5. Proportion of recurrence-free patients is shown on the Y-axis, time in years is shown on the x-axis.

[0134] FIG. 96 shows Kaplan-Meier survival analysis of PITX2 performance on sub-populations based on stage according to Example 5.

[0135] FIG. 97 shows Kaplan-Meier survival analysis of PITX2 performance on sub-populations based on Gleason score according to Example 5.

[0136] FIG. 98 shows Kaplan-Meier survival analysis of PITX2 performance on sub-populations based on nomogram score according to Example 5.

[0137] FIG. 99 shows Kaplan-Meier survival analysis of SEQ ID NO: 63 performance on sub-populations based on High Gleason score according to Example 5.

[0138] FIG. 100 shows Kaplan-Meier survival analysis of SEQ ID NO: 63 performance on sub-populations based on poor nomogram score according to Example 5.

[0139] FIG. 101 shows Kaplan-Meier survival analysis of SEQ ID NO: 35 performance on T2 sub-populations according to Example 5.

[0140] FIG. 102 shows the detected amplificate in both frozen and PET samples in the early biochemical relapse vs. no biochemical relapse comparisons using the assay of SEQ ID NO: 19 shown in Table 12 as detailed in Example 6.

[0141] FIG. 103 shows the detected amplificate in both frozen and PET samples in the early biochemical relapse vs. no biochemical relapse comparisons using the assay of SEQ ID NO: 63 shown in Table 12 as detailed in Example 6.

[0142] FIG. 104 shows the detected amplificate in both frozen and PET samples in the early biochemical relapse vs. no biochemical relapse comparisons using the assay of SEQ ID NO: 35 shown in Table 12 as detailed in Example 6.

[0143] FIG. 105 shows the detected amplificate in both frozen and PET samples in the early biochemical relapse vs. no biochemical relapse comparisons using the assay of SEQ ID NO: 37 shown in Table 12 as detailed in Example 6.

[0144] FIG. 106 shows the detected amplificate in PET samples only in the early biochemical relapse vs. no biochemical relapse comparisons using the assay of SEQ ID NO: 19 shown in Table 12 as detailed in Example 6.

[0145] FIG. 107 shows the detected amplificate in PET samples only in the early biochemical relapse vs. no biochemical relapse comparisons using the assay of SEQ ID NO: 63 shown in Table 12 as detailed in Example 6.

[0146] FIG. 108 shows the detected amplificate in PET samples only in the early biochemical relapse vs. no biochemical relapse comparisons using the assay of SEQ ID NO: 35 shown in Table 12 as detailed in Example 6.

[0147] FIG. 109 shows the detected amplificate in PET samples only in the early biochemical relapse vs. no biochemical relapse comparisons using the assay of SEQ ID NO: 37 shown in Table 12 as detailed in Example 6.

[0148] FIG. 110 shows the detected amplificate in frozen samples only in the early biochemical relapse vs. no biochemical relapse comparisons using the assay of SEQ ID NO: 19 shown in Table 12 as detailed in Example 6.

[0149] FIG. 111 shows the detected amplificate in frozen samples only in the early biochemical relapse vs. no biochemical relapse comparisons using the assay of SEQ ID NO: 63 shown in Table 12 as detailed in Example 6.

[0150] FIG. 112 shows the detected amplificate in frozen samples only in the early biochemical relapse vs. no biochemical relapse comparisons using the assay of SEQ ID NO: 35 shown in Table 12 as detailed in Example 6.

[0151] FIG. 113 shows the detected amplificate in frozen samples only in the early biochemical relapse vs. no biochemical relapse comparisons using the assay of SEQ ID NO: 37 shown in Table 12 as detailed in Example 6.

[0152] FIG. 114 shows the detected amplificate in both frozen and PET samples in the High Gleason vs. Low Gleason comparisons using the assay of SEQ ID NO: 19 shown in Table 12 as detailed in Example 6.

[0153] FIG. 115 shows the detected amplificate in both frozen and PET samples in the High Gleason vs. Low Gleason comparisons using the assay of SEQ ID NO: 63 shown in Table 12 as detailed in Example 6.

[0154] FIG. 116 shows the detected amplificate in both frozen and PET samples in the High Gleason vs. Low Gleason comparisons using the assay of SEQ ID NO: 35 shown in Table 12 as detailed in Example 6.

[0155] FIG. 117 shows the detected amplificate in both frozen and PET samples in the High Gleason vs. Low Gleason comparisons using the assay of SEQ ID NO: 37 shown in Table 12 as detailed in Example 6.

[0156] FIG. 118 shows the detected amplificate in PET samples only in the High Gleason vs. Low Gleason comparisons using the assay of SEQ ID NO: 19 shown in Table 12 as detailed in Example 6.

[0157] FIG. 119 shows the detected amplificate in PET samples only in the High Gleason vs. Low Gleason comparisons using the assay of SEQ ID NO: 63 shown in Table 12 as detailed in Example 6.

[0158] FIG. 120 shows the detected amplificate in PET samples only in the High Gleason vs. Low Gleason comparisons using the assay of SEQ ID NO: 35 shown in Table 12 as detailed in Example 6.

[0159] FIG. 121 shows the detected amplificate in PET samples only in the High Gleason vs. Low Gleason comparisons using the assay of SEQ ID NO: 37 shown in Table 12 as detailed in Example 6.

[0160] FIG. 122 shows the detected amplificate in frozen samples only in the High Gleason vs. Low Gleason comparisons using the assay of SEQ ID NO: 19 shown in Table 12 as detailed in Example 6.

[0161] FIG. 123 shows the detected amplificate in frozen samples only in the High Gleason vs. Low Gleason comparisons using the assay of SEQ ID NO: 63 shown in Table 12 as detailed in Example 6.

[0162] FIG. 124 shows the detected amplificate in frozen samples only in the High Gleason vs. Low Gleason comparisons using the assay of SEQ ID NO: 35 shown in Table 12 as detailed in Example 6.

[0163] FIG. 125 shows the detected amplificate in frozen samples only in the High Gleason vs. Low Gleason comparisons using the assay of SEQ ID NO: 37 shown in Table 12 as detailed in Example 6.

### DETAILED DESCRIPTION OF THE INVENTION

### Definitions

[0164] As used herein the term expression shall be taken to mean the transcription and translation of a gene. The level of expression of a gene may be determined by the analysis of any factors associated with or indicative of the level of transcription and translation of a gene including but not limited to methylation analysis, loss of heterozygosity (hereinafter also referred to as LOH), RNA expression levels and protein expression levels.

[0165] Furthermore the activity of the transcribed gene may be affected by genetic variations such as but not limited genetic mutations (including but not limited to SNPs, point mutations, deletions, insertions, repeat length, rearrangements and other polymorphisms).

[0166] As used herein the term “prognosis” shall be taken to mean a prediction of the progression of the disease (for example but not limited to regression, stasis and metastasis), in particular aggressiveness and metastatic potential of a prostate tumor.

[0167] As used herein the term “prognostic marker” shall be taken to mean an indicator of a prediction of the progression of the disease, in particular aggressiveness and metastatic potential of a prostate tumor.

[0168] As used herein the term “prognostic classification” shall be taken to mean the classification of a prostate cell proliferative disorder according to a prediction of the progression of the disease, in particular aggressiveness and metastatic potential of a prostate tumor.

[0169] It is preferably used to define patients with high, low and intermediate risks of death or recurrence after treatment that result from the inherent heterogeneity of the disease process. As used herein the term “aggressive” as used with respect to prostate tumor shall be taken to mean a prostate cell proliferative disorder that has the biological capability to rapidly spread outside of the prostate. Indicators of tumor aggressivness standard in the art include but are not limited to tumor stage, tumor grade, Gleason grade, nodal status and survival. As used herein the term “survival” shall not be limited to mean survival until mortality (wherein said mortality may be either irrespective of cause or prostate cell proliferative disorder related) but may be used in combination with other terms to define clinical terms, for example but not limited to “recurrence-free survival” (wherein the term recurrence shall include both localized and distant recurrence); metastasis free survival; disease free survival (wherein the term disease shall include prostate cancer and diseases associated therewith). The length of said survival may be calculated by reference to a defined start point (e.g. time of diagnosis or start of treatment) and a defined end point (e.g. death, recurrence or metastasis).

[0170] The term “Observed/Expected Ratio” (“O/E Ratio”) refers to the frequency of CpG dinucleotides within a particular DNA sequence, and corresponds to the [number of CpG sites/(number of C bases×number of G bases)].

[0171] The term “CpG island” refers to a contiguous region of genomic DNA that satisfies the criteria of (1) having a frequency of CpG dinucleotides corresponding to an “Observed/Expected Ratio”>0.6, and (2) having a “GC Content”>0.5. CpG islands are typically, but not always, between about 0.2 to about 1 kb, or to about 2 kb in length.

[0172] The term “methylation state” or “methylation status” refers to the presence or absence of 5-methylcytosine (“5-mCyt”) at one or a plurality of CpG dinucleotides within a DNA sequence. Methylation states at one or more particular CpG methylation sites (each having two CpG CpG dinucleotide sequences) within a DNA sequence include “unmethylated,” “fully-methylated” and “hemi-methylated.”

[0173] The term “hemi-methylation” or “hemimethylation” refers to the methylation state of a palindromic CpG methylation site, where only a single cytosine in one of the two CpG dinucleotide sequences of the palindromic CpG methylation site is methylated (e.g., 5′-CC^{M}GG-3′ (top strand): 3′-GGCC-5′ (bottom strand)).

[0174] The term ‘AUC’ as used herein is an abbreviation for the area under a curve. In particular it refers to the area under a Receiver Operating Characteristic (ROG) curve. The ROC curve is a plot of the true positive rate against the false positive rate for the different possible cutpoints of a diagnostic test. It shows the tradeoff between sensitivity and specificity depending on the selected cutpoint (any increase in sensitivity will be accompanied by a decrease in specificity). The area under an ROC curve (AUG) is a measure for the accuracy of a diagnostic test (the larger the area the better, optimum is 1, a random test would have a ROC curve lying on the diagonal with an area of 0.5; for reference: J. P. Egan. Signal Detection Theory and ROC Analysis, Academic Press, New York, 1975).

[0175] The term “hypermethylation” refers to the average methylation state corresponding to an increased presence of 5-mCyt at one or a plurality of CpG dinucleotides within a DNA sequence of a test DNA sample, relative to the amount of 5-mCyt found at corresponding CpG dinucleotides within a normal control DNA sample.

[0176] The term “hypomethylation” refers to the average methylation state corresponding to a decreased presence of 5-mCyt at one or a plurality of CpG dinucleotides within a DNA sequence of a test DNA sample, relative to the amount of 5-mCyt found at corresponding CpG dinucleotides within a normal control DNA sample.

[0177] The term “microarray” refers broadly to both “DNA microarrays,” and ‘DNA chip(s),’ as recognized in the art, encompasses all art-recognized solid supports, and encompasses all methods for affixing nucleic acid molecules thereto or synthesis of nucleic acids thereon.

[0178] “Genetic parameters” are mutations and polymorphisms of genes and sequences further required for their regulation. To be designated as mutations are, in particular, insertions, deletions, point mutations, inversions and polymorphisms and, particularly preferred, SNPs (single nucleotide polymorphisms).

[0179] “Epigenetic parameters” are, in particular, cytosine methylations. Further epigenetic parameters include, for example, the acetylation of histones which, however, cannot be directly analyzed using the described method but which, in turn, correlate with the DNA methylation.

[0180] The term “bisulfite reagent” refers to a reagent comprising bisulfite, disulfite, hydrogen sulfite or combinations thereof, useful as disclosed herein to distinguish between methylated and unmethylated CpG dinucleotide sequences.

[0181] The term “Methylation assay” refers to any assay for determining the methylation state of one or more CpG dinucleotide sequences within a sequence of DNA.

[0182] The term “MS AP-PCR” (Methylation-Sensitive Arbitrarily-Primed Polymerase Chain Reaction) refers to the art-recognized technology that allows for a global scan of the genome using CG-rich primers to focus on the regions most likely to contain CpG dinucleotides, and described by Gonzalgo et al., Cancer Research 57:594-599, 1997.

[0183] The term “MethyLight™” refers to the art-recognized fluorescence-based real-time PCR technique described by Eads et al., Cancer Res. 59:2302-2306, 1999.

[0184] The term HeavyMethyl™ assay, in the embodiment thereof implemented herein, refers to an assay, wherein methylation specific blocking probes (also referred to herein as blockers) covering CpG positions between, or covered by the amplification primers enable methylation-specific selective amplification of a nucleic acid sample.

[0185] The term “HeavyMethyl™ MethyLight™” assay, in the embodiment thereof implemented herein, refers to a HeavyMethyl™ MethyLight™ assay, which is a variation of the MethyLight™ assay, wherein the MethyLight™ assay is combined with methylation specific blocking probes covering CpG positions between the amplification primers.

[0186] The term “Ms-SNuPE” (Methylation-sensitive Single Nucleotide Primer Extension) refers to the art-recognized assay described by Gonzalgo & Jones, Nucleic Acids Res. 25:2529-2531, 1997.

[0187] The term “MSP” (Methylation-specific PCR) refers to the art-recognized methylation assay described by Herman et al. Proc. Natl. Acad. Sci. USA 93:9821-9826, 1996, and by U.S. Pat. No. 5,786,146.

[0188] The term “COBRA” (Combined Bisulfite Restriction Analysis) refers to the art-recognized methylation assay described by Xiong & Laird, Nucleic Acids Res. 25:2532-2534, 1997.

[0189] The term “MCA” (Methylated CpG Island Amplification) refers to the methylation assay described by Toyota et al., Cancer Res. 59:2307-12, 1999, and in WO 00/26401A1.

[0190] The term “hybridization” is to be understood as a bond of an oligonucleotide to a complementary sequence along the lines of the Watson-Crick base pairings in the sample DNA, forming a duplex structure.

[0191] “Stringent hybridization conditions,” as defined herein, involve hybridizing at 68° C. in 5×SSC/5×Denhardt's solution/1.0% SDS, and washing in 0.2×SSC/0.1% SDS at room temperature, or involve the art-recognized equivalent thereof (e.g., conditions in which a hybridization is carried out at 60° C. in 2.5×SSC buffer, followed by several washing steps at 37° C. in a low buffer concentration, and remains stable): Moderately stringent conditions, as defined herein, involve including washing in 3×SSC at 42° C., or the art-recognized equivalent thereof. The parameters of salt concentration and temperature can be varied to achieve the optimal level of identity between the probe and the target nucleic acid. Guidance regarding such conditions is available in the art, for example, by Sambrook et al., 1989, Molecular Cloning, A Laboratory Manual, Cold Spring Harbor Press, N.Y.; and Ausubel et al. (eds.), 1995, Current Protocols in Molecular Biology, (John Wiley & Sons, N.Y.) at Unit 2.10.

[0192] The terms “array SEQ ID NO,” “composite array SEQ ID NO,” or “composite array sequence” refer to a sequence, hypothetical or otherwise, consisting of a head-to-tail (5′ to 3′) linear composite of all individual contiguous sequences of a subject array (e.g., a head-to-tail composite of SEQ ID NO:1-71, in that order).

[0193] The terms “array SEQ ID NO node,” “composite array SEQ ID NO node,” or “composite array sequence node” refer to a junction between any two individual contiguous sequences of the “array SEQ ID NO,” the “composite array SEQ ID NO,” or the “composite array sequence.”

[0194] In reference to composite array sequences, the phrase “contiguous nucleotides” refers to a contiguous sequence region of any individual contiguous sequence of the composite array, but does not include a region of the composite array sequence that includes a “node,” as defined herein above.

### Overview:

[0195] The present invention provides for molecular genetic markers that have novel utility for providing a prognosis of prostate cell proliferative disorders. In particular embodiments said markers may be used for classifying the tumor according to aggressiveness and/or invasiveness. It is particularly preferred that the method and nucleic acids according to the invention are utilised for at least one of: prognosis of; treatment of; monitoring of; and treatment and monitoring of prostate cell proliferative disorders.

[0196] The term ‘prognosis’ is taken to mean a prediction of outcome of disease progression (wherein the term progression shall be taken to also include recurrence after treatment). Prognosis may be expressed in terms of overall patient survival, disease- or relapse-free survival, increased tumor-related complications and rate of progression of tumour or metastases, wherein a decrease in any of said factors (with the exception of increased tumor-related complications rate of progression) as relative to a pre-determined level, is a ‘negative’ outcome and increase thereof is a ‘positive’ outcome. A decrease in tumor-related complications and/or rate of progression of tumour or metastases as relative to a pre-determined level, is considered a ‘positive’ outcome and increase thereof is a ‘negative’ outcome.

[0197] Hereinafter prognosis may also be referred to in terms of ‘aggressiveness’ wherein an aggressive cancer is determined to have a high risk of negative outcome and wherein a non-aggressive cancer has a low risk of negative outcome.

[0198] In one aspect the prognostic marker according to the present invention is used to provide an estimate of the risk of negative outcome. Characterisation of a prostate cancer in terms of predicted outcome enables the physician to determine the risk of recurrence and/or death. This aids in treatment selection as the absolute reduction of risk of recurrence and death after treatments such as adjuvant hormonal, chemo-, and radiation therapy can be determined based on the predicted negative outcome. The absolute reduction in risk attributable to treatment may then be compared to the drawbacks of said treatment (e.g. side effects, cost) in order to determine the suitability of said treatment for the patient.

[0199] Conversely, wherein a cancer is characterised as non-aggressive (i.e. positive outcome with low risk of death and/or recurrence) the patient will derive low absolute benefit from adjuvant or other treatment and may be appropriately treated by watchful waiting. Therein lies a great advantage of the present invention. By providing a means for determining which patients will not significantly benefit from treatment the present invention identifies suitable candidates for watchful waiting and prevents the over-prescription of therapies.

[0200] According to the predicted outcome (i.e. prognosis) of the disease an appropriate treatment or treatments may be selected. Wherein a cancer is characterised as aggressive it is particularly preferred that adjuvant treatment such as, but not limited to, hormonal, chemo- or radiation therapy is provided in addition to or instead of further treatments.

[0201] The herein described markers have further utility in predicting outcome of a patient after surgical treatment. This will hereinafter also be referred to as a ‘predictive’ marker. Over expression of the genes according to Table 11 (in particular FOXL2, SEQ ID NO: 35, SEQ ID NO: 63, HIST2H2BF, GPR7 and most preferably PITX2), are associated with negative outcome of prostate cancer patients. Patients with predicted positive outcome (i.e. hypomethylation or over-expression) after said treatment will accordingly have a decreased absolute reduction of risk of recurrence and death after treatment with post surgical adjuvant therapies. Patients with predicted negative outcome (i.e. hypermethylation) after said treatment will accordingly have a relatively larger absolute reduction of risk of recurrence and death after post surgical adjuvant treatment. Accordingly patients with a negative outcome after said treatment will be considered more suitable candidates for adjuvant treatment than patients with a positive outcome. Patients with a positive outcome may accordingly be prevented from over prescription of adjuvant treatment.

[0202] Bisulfite modification of DNA is an art-recognized tool used to assess CpG methylation status. 5-methylcytosine is the most frequent covalent base modification in the DNA of eukaryotic cells. It plays a role, for example, in the regulation of the transcription, in genetic imprinting, and in tumorigenesis. Therefore, the identification of 5-methylcytosine as a component of genetic information is of considerable interest. However, 5-methylcytosine positions cannot be identified by sequencing, because 5-methylcytosine has the same base pairing behavior as cytosine. Moreover, the epigenetic information carried by 5-methylcytosine is completely lost during, e.g., PCR amplification.

[0203] The most frequently used method for analyzing DNA for the presence of 5-methylcytosine is based upon the specific reaction of bisulfite with cytosine whereby, upon subsequent alkaline hydrolysis, cytosine is converted to uracil, which corresponds to thymine in its base pairing behavior. Significantly, however, 5-methylcytosine remains unmodified under these conditions. Consequently, the original DNA is converted in such a manner that methylcytosine, which originally could not be distinguished from cytosine by its hybridization behavior, can now be detected as the only remaining cytosine using standard, art-recognized molecular biological techniques, for example, by amplification and hybridization, or by sequencing. All of these techniques are based on differential base pairing properties, which can now be fully exploited.

[0204] The prior art, in terms of sensitivity, is defined by a method comprising enclosing the DNA to be analyzed in an agarose matrix, thereby preventing the diffusion and renaturation of the DNA (bisulfite only reacts with single-stranded DNA), and replacing all precipitation and purification steps with fast dialysis (Olek A, et al., A modified and improved method for bisulfite based cytosine methylation analysis, Nucleic Acids Res. 24:5064-6, 1996). It is thus possible to analyze individual cells for methylation status, illustrating the utility and sensitivity of the method. An overview of art-recognized methods for detecting 5-methylcytosine is provided by Rein, T., et al., Nucleic Acids Res., 26:2255, 1998.

[0205] The bisulfite technique, barring few exceptions (e.g., Zeschnigk M, et al., Eur J Hum Genet. 5:94-98, 1997), is currently only used in research. In all instances, short, specific fragments of a known gene are amplified subsequent to a bisulfite treatment, and either completely sequenced (Olek & Walter, Nat. Genet. 1997 17:275-6, 1997), subjected to one or more primer extension reactions (Gonzalgo & Jones, Nucleic Acids Res., 25:2529-31, 1997; WO 95/00669; U.S. Pat. No. 6,251,594) to analyze individual cytosine positions, or treated by enzymatic digestion (Xiong & Laird, Nucleic Acids Res., 25:2532-4. 1997). Detection by hybridization has also been described in the art (Olek et al., WO 99/28498). Additionally, use of the bisulfite technique for methylation detection with respect to individual genes has been described (Grigg & Clark, Bioessays, 16:431-6, 1994; Zeschnigk M, et al., Hum Mol. Genet., 6:387 95, 1997; Feil R, et al., Nucleic Acids Res., 22:695-, 1994; Martin V, et al., Gene, 157:2614, 1995; WO 9746705 and WO 9515373).

[0206] The present invention provides for the use of the bisulfite technique, in combination with one or more methylation assays, for determination of the methylation status of CpG dinucleotide sequences within sequences from the group consisting of SEQ ID NO:1 to SEQ ID NO:64 and SEQ ID NO: 961. Preferably said group consists of SEQ ID Nos: 35, 63, 19 and most preferably said sequence is SEQ ID NO: 961 According to the present invention, determination of the methylation status of CpG dinucleotide sequences within sequences from the group consisting of SEQ ID NO:1 to SEQ ID NO:64 and SEQ ID NO: 961 and SEQ ID NO: 961 has prognostic utility.

[0207] Methylation Assay Procedures. Various methylation assay procedures are known in the art, and can be used in conjunction with the present invention. These assays allow for determination of the methylation state of one or a plurality of CpG dinucleotides (e.g., CpG islands) within a DNA sequence. Such assays involve, among other techniques, DNA sequencing of bisulfite-treated DNA, PCR (for sequence-specific amplification), Southern blot analysis, and use of methylation-sensitive restriction enzymes.

[0208] For example, genomic sequencing has been simplified for analysis of DNA methylation patterns and 5-methylcytosine distribution by using bisulfite treatment (Frommer et al., Proc. Nail. Acad. Sci. USA 89:1827-1831, 1992). Additionally, restriction enzyme digestion of PCR products amplified from bisulfite-converted DNA is used, e.g., the method described by Sadri & Hornsby (Nucl. Acids Res. 24:5058-5059, 1996), or COBRA (Combined Bisulfite Restriction Analysis) (Xiong & Laird, Nucleic Acids Res. 25:2532-2534, 1997).

[0209] COBRA. COBRA analysis is a quantitative methylation assay useful for determining DNA methylation levels at specific gene loci in small amounts of genomic DNA (Xiong & Laird, Nucleic Acids Res. 25:2532-2534, 1997). Briefly, restriction enzyme digestion is used to reveal methylation-dependent sequence differences in PCR products of sodium bisulfite-treated DNA. Methylation-dependent sequence differences are first introduced into the genomic DNA by standard bisulfite treatment according to the procedure described by Frommer et al. (Proc. Nail. Acad. Sci. USA 89:1827-1831, 1992). PCR amplification of the bisulfite converted DNA is then performed using primers specific for the CpG islands of interest, followed by restriction endonuclease digestion, gel electrophoresis, and detection using specific, labeled hybridization probes. Methylation levels in the original DNA sample are represented by the relative amounts of digested and undigested PCR product in a linearly quantitative fashion across a wide spectrum of DNA methylation levels. In addition, this technique can be reliably applied to DNA obtained from microdissected paraffin-embedded tissue samples. Typical reagents (e.g., as might be found in a typical COBRA-based kit) for COBRA analysis may include, but are not limited to: PCR primers for specific gene (or bisulfite treated DNA sequence or CpG island); restriction enzyme and appropriate buffer; gene-hybridization oligo; control hybridization oligo; kinase labeling kit for oligo probe; and labelled nucleotides. Additionally, bisulfite conversion reagents may include: DNA denaturation buffer; sulfonation buffer; DNA recovery reagents or kits (e.g., precipitation, ultrafiltration, affinity column); desulfonation buffer; and DNA recovery components.

[0210] Preferably, assays such as “MethyLight™” (a fluorescence-based real-time PCR technique) (Eads et al., Cancer Res. 59:2302-2306, 1999), Ms-SNuPE (Methylation-sensitive Single Nucleotide Primer Extension) reactions (Gonzalgo & Jones, Nucleic Acids Res. 25:2529-2531, 1997), methylation-specific PCR (“MSP”; Herman et al., Proc. Natl. Acad. Sci. USA 93:9 B21-9826, 1996; U.S. Pat. No. 5,786,146), and methylated CpG island amplification (“MCA”; Toyota et al., Cancer Res. 59:2307-12, 1999) are used alone or in combination with other of these methods.

[0211] MethyLigh™. The MethyLight™ assay is a high-throughput quantitative methylation assay that utilizes fluorescence-based real-time PCR (TaqMan™) technology that requires no further manipulations after the PCR step (Eads et al., Cancer Res. 59:2302-2306, 1999). Briefly, the MethyLight™ process begins with a mixed sample of genomic DNA that is converted, in a sodium bisulfite reaction, to a mixed pool of methylation-dependent sequence differences according to standard procedures (the bisulfite process converts unmethylated cytosine residues to uracil). Fluorescence-based PCR is then performed either in an “unbiased” (with primers that do not overlap known CpG methylation sites) PCR reaction, or in a “biased” (with PCR primers that overlap known CpG dinucleotides) reaction. Sequence discrimination can occur either at the level of the amplification process or at the level of the fluorescence detection process, or both.

[0212] The MethyLight™ assay may be used as a quantitative test for methylation patterns in the genomic DNA sample, wherein sequence discrimination occurs at the level of probe hybridization. In this quantitative version, the PCR reaction provides for unbiased amplification in the presence of a fluorescent probe that overlaps a particular putative methylation site. An unbiased control for the amount of input DNA is provided by a reaction in which neither the primers, nor the probe overlie any CpG dinucleotides. Alternatively, a qualitative test for genomic methylation is achieved by probing of the biased PCR pool with either control oligonucleotides that do not “cover” known methylation sites (a fluorescence-based version of the “MSP” technique), or with oligonucleotides covering potential methylation sites.

[0213] The MethyLight™ process can by used with a “TaqMan®” probe in the amplification process. For example, double-stranded genomic DNA is treated with sodium bisulfite and subjected to one of two sets of PCR reactions using TaqMan® probes; e.g., with either biased primers and TaqMan® probe, or unbiased primers and TaqMan® probe. The TaqMan® probe is dual-labeled with fluorescent ‘reporter’ and “quencher” molecules, and is designed to be specific for a relatively high GC content region so that it melts out at about 10° C. higher temperature in the PCR cycle than the forward or reverse primers. This allows the TaqMan® probe to remain fully hybridized during the PCR annealing/extension step. As the Taq polymerase enzymatically synthesizes a new strand during PCR, it will eventually reach the annealed TaqMan® probe. The Taq polymerase 5′ to 3′ endonuclease activity will then displace the TaqMan® probe by digesting it to release the fluorescent reporter molecule for quantitative detection of its now unquenched signal using a real-time fluorescent detection system.

[0214] Typical reagents (e.g., as might be found in a typical MethyLight™-based kit) for MethyLight™ analysis may include, but are not limited to: PCR primers for specific gene (or bisulfite treated DNA sequence or CpG island); TaqMan® probes; optimized PCR buffers and deoxynucleotides; and Taq polymerase.

[0215] Ms-SNuPE. The Ms-SNuPE technique is a quantitative method for assessing methylation differences at specific CpG sites based on bisulfite treatment of DNA, followed by single-nucleotide primer extension (Gonzalgo & Jones, Nucleic Acids Res. 25:2529-2531, 1997). Briefly, genomic DNA is reacted with sodium bisulfite to convert unmethylated cytosine to uracil while leaving 5-methylcytosine unchanged. Amplification of the desired target sequence is then performed using PCR primers specific for bisulfite-converted DNA, and the resulting product is isolated and used as a template for methylation analysis at the CpG site(s) of interest. Small amounts of DNA can be analyzed (e.g., microdissected pathology sections), and it avoids utilization of restriction enzymes for determining the methylation status at CpG sites.

[0216] Typical reagents (e.g., as might be found in a typical Ms-SNuPE-based kit) for Ms-SNuPE analysis may include, but are not limited to: PCR primers for specific gene (or bisulfite treated DNA sequence or CpG island); optimized PCR buffers and deoxynucleotides; gel extraction kit; positive control primers; Ms-SNuPE primers for specific gene; reaction buffer (for the Ms-SNuPE reaction); and labelled nucleotides. Additionally, bisulfite conversion reagents may include: DNA denaturation buffer; sulfonation buffer; DNA recovery regents or kit (e.g., precipitation, ultrafiltration, affinity column); desulfonation buffer; and DNA recovery components.

[0217] MSP. MSP (methylation-specific PCR) allows for assessing the methylation status of virtually any group of CpG sites within a CpG island, independent of the use of methylation-sensitive restriction enzymes (Herman et al. Proc. Natl. Acad. Sci. USA 93:9821-9826, 1996; U.S. Pat. No. 5,786,146).

[0218] Briefly, DNA is modified by sodium bisulfite converting all unmethylated, but not methylated cytosines to uracil, and subsequently amplified with primers specific for methylated versus unmethylated DNA. MSP requires only small quantities of DNA, is sensitive to 0.1% methylated alleles of a given CpG island locus, and can be performed on DNA extracted from paraffin-embedded samples. Typical reagents (e.g., as might be found in a typical MSP-based, kit) for MSP analysis may include, but are not limited to: methylated and unmethylated PCR primers for specific gene (or bisulfite treated DNA sequence or CpG island), optimized PCR buffers and deoxynucleotides, and specific probes.

[0219] MCA. The MCA technique is a method that can be used to screen for altered methylation patterns in genomic DNA, and to isolate specific sequences associated with these changes (Toyota et al., Cancer Res. 59:2307-12, 1999). Briefly, restriction enzymes with different sensitivities to cytosine methylation in their recognition sites are used to digest genomic DNAs from primary tumors, cell lines, and normal tissues prior to arbitrarily primed PCR amplification. Fragments that show differential methylation are cloned and sequenced after resolving the PCR products on high-resolution polyacrylamide gels. The cloned fragments are then used as probes for Southern analysis to confirm differential methylation of these regions. Typical reagents (e.g., as might be found in a typical MCA-based kit) for MCA analysis may include, but are not limited to: PCR primers for arbitrary priming Genomic DNA; PCR buffers and nucleotides, restriction enzymes and appropriate buffers; gene-hybridization oligos or probes; control hybridization oligos or probes.

Genomic Sequences According to SEQ ID NOS:1-64 and SEQ ID NO: 961 (Preferably SEQ ID Nos: 35. 63, 19 and most Preferably SEQ ID NO: 961), and Non-Naturally Occurring Treated Variants Thereof According to SEQ ID NOS:65-320 and SEQ ID Nos: 962-965 (Preferably SEQ ID Nos: 133, 134, 261, 262, 189, 190, 317, 318, 101, 102, 229, 230 and Most Preferably SEQ ID Nos: 962-965), were Determined to have Utility for Providing a Prognosis and/or Treatment of Prostate Cell Proliferative Disorders.

[0220] In one embodiment the invention provides a method for providing a prognosis of prostate cell proliferative disorders in a subject. In a particularly preferred embodiment the invention provides a method for the classification based on aggressiveness of a prostate cell proliferative disorder.

[0221] Said method comprises the following steps:

[0222] i) determining the expression levels of one or more genes or gene sequences according to Table 11 and/or regulatory regions thereof; and

[0223] ii) determining the prognosis of said prostate cell proliferative disorders according to said level of expression.

Said expression level may be determined by any means standard in the art including but not limited to methylation analysis, loss of heterozygosity (hereinafter also referred to as LOH), RNA expression levels and protein expression levels.
Accordingly said method may be enabled by means of any analysis of the expression of a RNA transcribed therefrom or polypeptide or protein translated from said RNA, preferably by means of mRNA expression analysis or polypeptide expression analysis. Accordingly the present invention also provides prognostic assays and methods, both quantitative and qualitative for detecting the expression of the genes, genomic sequences and/or regulatory regions according to Table 11 in a subject with a prostate carcinoma or neoplasms and determining therefrom upon the prognosis and/or prediction of treatment outcome in said subject. It is particularly preferred that said genes, genomic sequences and/or regulatory regions are selected from the group consisting PITX2, SEQ ID NO: 63, GPR7 and SEQ ID NO: 35. Further preferred is the gene PITX2.

[0224] Aberrant expression of mRNA transcribed from the genes or genomic regions according to Table 11, in particular SEQ ID NO: 35, SEQ ID NO: 63 and GPR7 and most preferably PITX2 are associated with prognosis and/or prediction of treatment outcome of prostate carcinoma.

To detect the presence of mRNA encoding a gene or genomic sequence, a sample is obtained from a patient. The sample may be any suitable sample comprising cellular matter of the tumour, most preferably the primary tumour. Suitable sample types include tumours cells or cell lines, histological slides, paraffin embedded tissues, biopsies, tissue embedded in paraffin, bodily fluids (such as but not limited to prostatic massage fluid and urine) or any other suitable biological sample and all possible combinations thereof.
In a particularly preferred embodiment of the method said source is primary tumour tissue. The sample may be treated to extract the RNA contained therein. The resulting nucleic acid from the sample is then analysed. Many techniques are known in the state of the art for determining absolute and relative levels of gene expression, commonly used techniques suitable for use in the present invention include in situ hybridisation (e.g. FISH), Northern analysis, RNase protection assays (RPA), microarrays and PCR-based techniques, such as quantitative PCR and differential display PCR or any other nucleic acid detection method.

[0225] Particularly preferred is the use of the reverse transcription/polymerisation chain reaction technique (RT-PCR). The method of RT-PCR is well known in the art (for example, see Watson and Fleming, supra).

[0226] The RT-PCR method can be performed as follows. Total cellular RNA is isolated by, for example, the standard guanidium isothiocyanate method and the total RNA is reverse transcribed. The reverse transcription method involves synthesis of DNA on a template of RNA using a reverse transcriptase enzyme and a 3′ end oligo dT primer and/or random hexamer primers. The cDNA thus produced is then amplified by means of PCR. (Belyavsky et al, Nucl Acid Res 17:2919-2932, 1989; Krug and Berger, Methods in Enzymology, Academic Press, N.Y., Vol. 152, pp. 316-325, 1987 which are incorporated by reference). Further preferred is the “Real-time” variant of RT-PCR, wherein the PCR product is detected by means of hybridisation probes (E.g TaqMan, Lightcycler, Molecular Beacons & Scorpion) or SYBR green. The detected signal from the probes or SYBR green is then quantitated either by reference to a standard curve or by comparing the Ct values to that of a calibration standard. Analysis of housekeeping genes is often used to normalize the results.

[0227] In Northern blot analysis total or poly(A)+ mRNA is run on a denaturing agarose gel and detected by hybridization to a labelled probe in the dried gel itself or on a membrane. The resulting signal is proportional to the amount of target RNA in the RNA population.

[0228] Comparing the signals from two or more cell populations or tissues reveals relative differences in gene expression levels. Absolute quantitation can be performed by comparing the signal to a standard curve generated using known amounts of an in vitro transcript corresponding to the target RNA. Analysis of housekeeping genes, genes whose expression levels are expected to remain relatively constant regardless of conditions, is often used to normalize the results, eliminating any apparent differences caused by unequal transfer of RNA to the membrane or unequal loading of RNA on the gel.

[0229] The first step in Northern analysis is isolating pure, intact RNA from the cells or tissue of interest. Because Northern blots distinguish RNAs by size, sample integrity influences the degree to which a signal is localized in a single band. Partially degraded RNA samples will result in the signal being smeared or distributed over several bands with an overall loss in sensitivity and possibly an erroneous interpretation of the data. In Northern blot analysis, DNA, RNA and oligonucleotide probes can be used and these probes are preferably labelled (e.g. radioactive labels, massa labels or fluorescent labels). The size of the target RNA, not the probe, will determine the size of the detected band, so methods such as random-primed labeling, which generates probes of variable lengths, are suitable for probe synthesis. The specific activity of the probe will determine the level of sensitivity, so it is preferred that probes with high specific activities, are used.

[0230] In an RNase protection assay, the RNA target and an RNA probe of a defined length are hybridized in solution. Following hybridization, the RNA is digested with RNases specific for single-stranded nucleic acids to remove any unhybridized, single-stranded target RNA and probe. The RNases are inactivated, and the RNA is separated e.g. by denaturing polyacrylamide gel electrophoresis. The amount of intact RNA probe is proportional to the amount of target RNA in the RNA population. RPA can be used for relative and absolute quantitation of gene expression and also for mapping RNA structure, such as intron/exon boundaries and transcription start sites. The RNase protection assay is preferable to Northern blot analysis as it generally has a lower limit of detection.

[0231] The antisense RNA probes used in RPA are generated by in vitro transcription of a DNA template with a defined endpoint and are typically in the range of 50-600 nucleotides. The use of RNA probes that include additional sequences not homologous to the target RNA allows the protected fragment to be distinguished from the full-length probe. RNA probes are typically used instead of DNA probes due to the ease of generating single-stranded RNA probes and the reproducibility and reliability of RNA:RNA duplex digestion with RNases (Ausubel et al. 2003), particularly preferred are probes with high specific activities.

[0232] Particularly preferred is the use of microarrays. The microarray analysis process can be divided into two main parts. First is the immobilization of known gene sequences onto glass slides or other solid support followed by hybridization of the fluorescently labelled cDNA (comprising the sequences to be interrogated) to the known genes immobilized on the glass slide. After hybridization, arrays are scanned using a fluorescent microarray scanner. Analyzing the relative fluorescent intensity of different genes provides a measure of the differences in gene expression.

[0233] DNA arrays can be generated by immobilizing presynthesized oligonucleotides onto prepared glass slides. In this case, representative gene sequences are manufactured and prepared using standard oligonucleotide synthesis and purification methods. These synthesized gene sequences are complementary to the genes of interest (most preferably PITX2) and tend to be shorter sequences in the range of 25-70 nucleotides. Alternatively, immobilized oligos can be chemically synthesized in-situ on the surface of the slide. In situ oligonucleotide synthesis involves the consecutive addition of the appropriate nucleotides to the spots on the microarray; spots not receiving a nucleotide are protected during each stage of the process using physical or virtual masks.

[0234] In expression profiling microarray experiments, the RNA templates used are representative of the transcription profile of the cells or tissues under study. RNA is first isolated from the cell populations or tissues to be compared. Each RNA sample is then used as a template to generate fluorescently labelled cDNA via a reverse transcription reaction. Fluorescent labeling of the cDNA can be accomplished by either direct labeling or indirect labeling methods. During direct labeling, fluorescently modified nucleotides (e.g., Cy®3- or Cy®5-dCTP) are incorporated directly into the cDNA during the reverse transcription. Alternatively, indirect labeling can be achieved by incorporating aminoalkyl-modified nucleotides during cDNA synthesis and then conjugating an N-hydroxysuccinimide (NHS)-ester dye to the aminoalkyl-modified cDNA after the reverse transcription reaction is complete. Alternatively, the probe may be unlabelled, but may be detectable by specific binding with a ligand which is labelled, either directly or indirectly. Suitable labels and methods for labelling ligands (and probes) are known in the art, and include, for example, radioactive labels which may be incorporated by known methods (e.g., nick translation or kinasing). Other suitable labels include but are not limited to biotin, fluorescent groups, chemiluminescent groups (e.g., dioxetanes, particularly triggered dioxetanes), enzymes, antibodies, and the like.

[0235] To perform differential gene expression analysis, cDNA generated from different RNA samples are labelled with Cy®3. The resulting labelled cDNA is purified to remove unincorporated nucleotides, free dye and residual RNA. Following purification, the labeled cDNA samples are hybridised to the microarray. The stringency of hybridisation is determined by a number of factors during hybridisation and during the washing procedure, including temperature, ionic strength, length of time and concentration of formamide. These factors are outlined in, for example, Sambrook et al. (Molecular Cloning: A Laboratory Manual, 2nd ed., 1989). The microarray is scanned post-hybridization using a fluorescent microarray scanner.

[0236] The fluorescent intensity of each spot indicates the level of expression for that gene; bright spots correspond to strongly expressed genes, while dim spots indicate weak expression.

[0237] Once the images are obtained, the raw data must be analyzed. First, the background fluorescence must be subtracted from the fluorescence of each spot. The data is then normalized to a control sequence, such as an exogenously added RNA, or a housekeeping gene panel to account for any nonspecific hybridization, array imperfections or variability in the array setup, cDNA labeling, hybridization or washing. Data normalization allows the results of multiple arrays to be compared.

[0238] The present invention further provides for methods for the detection of the presence of the polypeptide encoded by said gene sequences in a sample obtained from a patient.

[0239] Aberrant levels of polypeptide expression of the polypeptides encoded by the genes and/or genomic regions according to Table 11 (in particular SEQ ID NO: 35, SEQ ID NO: 63, GPR7 and most preferably PITX2) are associated with prostate cancer and neoplasms prognosis and/or treatment outcome.

[0240] Any method known in the art for detecting polypeptides can be used. Such methods include, but are not limited to mass-spectrometry, immunodiffusion, immunoelectrophoresis, immunochemical methods, binder-ligand assays, immunohistochemical techniques, agglutination and complement assays (e.g., see Basic and Clinical Immunology, Sites and Terr, eds., Appleton & Lange, Norwalk, Conn. pp 217-262, 1991 which is incorporated by reference). Preferred are binder-ligand immunoassay methods including reacting antibodies with an epitope or epitopes and competitively displacing a labelled polypeptide or derivative thereof.

[0241] Certain embodiments of the present invention comprise the use of antibodies specific to the polypeptide encoded by the genes and/or genomic regions according to Table 11 (in particular SEQ ID NO: 35, SEQ ID NO: 63, GPR7 and most preferably PITX2).

[0242] Such antibodies are useful for prostate cancer prognostic and/or predictive applications. In certain embodiments production of monoclonal or polyclonal antibodies can be induced by the use of the coded polypeptide as an antigene. Such antibodies may in turn be used to detect expressed polypeptides as markers for prostate cancer prognosis. The levels of such polypeptides present may be quantified by conventional methods. Antibody-polypeptide binding may be detected and quantified by a variety of means known in the art, such as labelling with fluorescent or radioactive ligands. The invention further comprises kits for performing the above-mentioned procedures, wherein such kits contain antibodies specific for the investigated polypeptides.

[0243] Numerous competitive and non-competitive polypeptide binding immunoassays are well known in the art. Antibodies employed in such assays may be unlabelled, for example as used in agglutination tests, or labelled for use a wide variety of assay methods. Labels that can be used include radionuclides, enzymes, fluorescers, chemiluminescers, enzyme substrates or co-factors, enzyme inhibitors, particles, dyes and the like. Preferred assays include but are not limited to radioimmunoassay (RIA), enzyme immunoassays, e.g., enzyme-linked immunosorbent assay (ELISA), fluorescent immunoassays and the like. Polyclonal or monoclonal antibodies or epitopes thereof can be made for use in immunoassays by any of a number of methods known in the art.

[0244] In an alternative embodiment of the method the proteins may be detected by means of western blot analysis. Said analysis is standard in the art, briefly proteins are separated by means of electrophoresis e.g. SDS-PAGE. The separated proteins are then transferred to a suitable membrane (or paper) e.g. nitrocellulose, retaining the special separation achieved by electrophoresis. The membrane is then incubated with a generic protein (e.g. milk protein) to bind remaining sticky places on the membrane. An antibody specific to the protein of interest is then added, said antibody being detectably labelled for example by dyes or enzymatic means (e.g. alkaline phosphatase or horseradish peroxidase) The location of the antibody on the membrane is then detected.

[0245] In an alternative embodiment of the method the proteins may be detected by means of immunohistochemistry (the use of antibodies to probe specific antigens in a sample). Said analysis is standard in the art, wherein detection of antigens in tissues is known as immunohistochemistry, while detection in cultured cells is generally termed immunocytochemistry. Briefly the primary antibody to be detected by binding to its specific antigen. The antibody-antigen complex is then bound by a secondary enzyme conjugated antibody. In the presence of the necessary substrate and chromogen the bound enzyme is detected according to colored deposits at the antibody-antigen binding sites. There is a wide range of suitable sample types, antigen-antibody affinity, antibody types, and detection enhancement methods. Thus optimal conditions for immunohistochemical or immunocytochemical detection must be determined by the person skilled in the art for each individual case.

[0246] One approach for preparing antibodies to a polypeptide is the selection and preparation of an amino acid sequence of all or part of the polypeptide, chemically synthesising the amino acid sequence and injecting it into an appropriate animal, usually a rabbit or a mouse (Milstein and Kohler Nature 256:495-497, 1975; Gulfre and Milstein, Methods in Enzymology: Immunochemical Techniques 73:1-46, Langone and Banatis eds., Academic Press, 1981 which are incorporated by reference). Methods for preparation of the polypeptides or epitopes thereof include, but are not limited to chemical synthesis, recombinant DNA techniques or isolation from biological samples.

[0247] In the final step of the method the prognosis of the patient is determined, whereby overexpression is indicative of negative prognosis. The term overexpression shall be taken to mean expression at a detected level greater than a pre-determined cut off which may be selected from the group consisting of the mean, median or an optimised threshold value.

[0248] Another aspect of the invention provides a kit for use in providing a prognosis of a subject with prostate cancer, comprising: a means for detecting polypeptides of a gene or genomic region according to Table 11 (in particular SEQ ID NO: 35, SEQ ID NO: 63 and GPR7 and most preferably PITX2). The means for detecting the polypeptides comprise preferably antibodies, antibody derivatives, or antibody fragments. The polypeptides are most preferrably detected by means of Western blotting utilizing a labelled antibody. In another embodiment of the invention the kit further comprising means for obtaining a biological sample of the patient. Preferred is a kit, which further comprises a container suitable for containing the means for detecting the polypeptides in the biological sample of the patient, and most preferably further comprises instructions for use and interpretation of the kit results. In a preferred embodiment the kit for use in determining treatment strategy for a patient with prostate cancer or neoplasms, comprises: (a) a means for detecting polypeptides of a gene or genomic region according to Table 11 (in particular SEQ ID NO: 35, SEQ ID NO: 63 and GPR7 and most preferably PITX2); (b) a container suitable for containing the said means and the biological sample of the patient comprising the polypeptides wherein the means can from complexes with the polypeptides; (c) a means to detect the complexes of (b); and optionally (d) instructions for use and interpretation of the kit results.

[0249] The kit may also contain other components such as buffers or solutions suitable for blocking, washing or coating, packaged in a separate container.

[0250] Another aspect of the invention relates to a kit for use in providing a prognosis of a subject with prostate cancer, said kit comprising: a means for measuring the level of transcription of a gene or genomic region according to Table 11 (in particular SEQ ID NO: 35, SEQ ID NO: 63 and GPR7 and most preferably PITX2). In a preferred embodiment the means for measuring the level of transcription comprise oligonucleotides or polynucleotides able to hybridise under stringent or moderately stringent conditions to the transcription products of a gene or genomic region according to Table 11 (in particular SEQ ID NO: 35, SEQ ID NO: 63 and GPR7 and most preferably PITX2). In a most preferred embodiment the level of transcription is determined by techniques selected from the group of Northern blot analysis, reverse transcriptase PCR, real-time PCR, RNAse protection, and microarray. In another embodiment of the invention the kit further comprises means for obtaining a biological sample of the patient. Preferred is a kit, which further comprises a container suitable for containing the means for measuring the level of transcription and the biological sample of the patient, and most preferably further comprises instructions for use and interpretation of the kit results.

[0251] In a preferred embodiment the kit for use in determining treatment strategy for a patient with prostate cancer comprises (a) a plurality of oligonucleotides or polynucleotides able to hybridise under stringent or moderately stringent conditions to the transcription products of a gene or genomic region according to Table 11 (in particular SEQ ID NO: 35, SEQ ID NO: 63 and GPR7 and most preferably PITX2); (b) a container suitable for containing the oligonucleotides or polynucleotides and a biological sample of the patient comprising the transcription products wherein the oligonucleotides or polynucleotide can hybridise under stringent or moderately stringent conditions to the transcription products, (c) means to detect the hybridisation of (b); and optionally, (d) instructions for use and interpretation of the kit results. The kit may also contain other components such as hybridization buffer (where the oligonucleotides are to be used as a probe) packaged in a separate container. Alternatively, where the oligonucleotides are to be used to amplify a target region, the kit may contain, packaged in separate containers, a polymerase and a reaction buffer optimized for primer extension mediated by the polymerase, such as PCR. Most preferably a kit according to the embodiments of the present invention is used for the determination of expression step of the methods according to other aspects of the invention.

[0252] In a further aspect, the invention provides a further method for providing a prognosis of a subject with prostate cancer comprising the following steps. In the first step of the method a sample is obtained from the subject. Suitable sample types include tumours cells or cell lines, histological slides, paraffin embedded tissues, biopsies, tissue embedded in paraffin, bodily fluids (such as but not limited to prostatic massage fluid and urine) or any other suitable biological sample and all possible combinations thereof. Commonly used techniques suitable for use in the present invention include in situ hybridisation (e.g. FISH), Northern analysis, RNase protection assays (RPA), microarrays and PCR-based techniques, such as quantitative PCR and differential display PCR or any other nucleic acid detection method.

[0253] Particularly preferred is the use of the reverse transcription/polymerisation chain reaction technique (RT-PCR). The method of RT-PCR is well known in the art (for example, see Watson and Fleming, supra).

[0254] The RT-PCR method can be performed as follows. Total cellular RNA is isolated by, for example, the standard guanidium isothiocyanate method and the total RNA is reverse transcribed. The reverse transcription method involves synthesis of DNA on a template of RNA using a reverse transcriptase enzyme and a 3′ end oligo dT primer and/or random hexamer primers. The cDNA thus produced is then amplified by means of PCR. (Belyavsky et al, Nucl Acid Res 17:2919-2932, 1989; Krug and Berger, Methods in Enzymology, Academic Press, N.Y., Vol. 152, pp. 316-325, 1987 which are incorporated by reference). Further preferred is the “Real-time” variant of RT-PCR, wherein the PCR product is detected by means of hybridisation probes (E.g TaqMan, Lightcycler, Molecular Beacons & Scorpion) or SYBR green. The detected signal from the probes or SYBR green is then quantitated either by reference to a standard curve or by comparing the Ct values to that of a calibration standard. Analysis of housekeeping genes is often used to normalize the results.

[0255] In Northern blot analysis total or poly(A)+ mRNA is run on a denaturing agarose gel and detected by hybridization to a labelled probe in the dried gel itself or on a membrane. The resulting signal is proportional to the amount of target RNA in the RNA population.

[0256] Comparing the signals from two or more cell populations or tissues reveals relative differences in gene-expression levels. Absolute quantitation can be performed by comparing the signal to a standard curve generated using known amounts of an in vitro transcript corresponding to the target RNA. Analysis of housekeeping genes, genes whose expression levels are expected to remain relatively constant regardless of conditions, is often used to normalize the results, eliminating any apparent differences caused by unequal transfer of RNA to the membrane or unequal loading of RNA on the gel.

[0257] The first step in Northern analysis is isolating pure, intact RNA from the cells or tissue of interest. Because Northern blots distinguish RNAs by size, sample integrity influences the degree to which a signal is localized in a single band. Partially degraded RNA samples will result in the signal being smeared or distributed over several bands with an overall loss in sensitivity and possibly an erroneous interpretation of the data. In Northern blot analysis, DNA, RNA and oligonucleotide probes can be used and these probes are preferably labelled (e.g. radioactive labels, massa labels or fluorescent labels). The size of the target RNA, not the probe, will determine the size of the detected band, so methods such as random-primed labeling, which generates probes of variable lengths, are suitable for probe synthesis. The specific activity of the probe will determine the level of sensitivity, so it is preferred that probes with high specific activities, are used.

[0258] In an RNase protection assay, the RNA target and an RNA probe of a defined length are hybridized in solution. Following hybridization, the RNA is digested with RNases specific for single-stranded nucleic acids to remove any unhybridized, single-stranded target RNA and probe. The RNases are inactivated, and the RNA is separated e.g. by denaturing polyacrylamide gel electrophoresis. The amount of intact RNA probe is proportional to the amount of target RNA in the RNA population. RPA can be used for relative and absolute quantitation of gene expression and also for mapping RNA structure, such as intron/exon boundaries and transcription start sites. The RNase protection assay is preferable to Northern blot analysis as it generally has a lower limit of detection.

[0259] The antisense RNA probes used in RPA are generated by in vitro transcription of a DNA template with a defined endpoint and are typically in the range of 50-600 nucleotides. The use of RNA probes that include additional sequences not homologous to the target RNA allows the protected fragment to be distinguished from the full-length probe. RNA probes are typically used instead of DNA probes due to the ease of generating single-stranded RNA probes and the reproducibility and reliability of RNA:RNA duplex digestion with RNases (Ausubel et al. 2003), particularly preferred are probes with high specific activities.

[0260] Particularly preferred is the use of microarrays. The microarray analysis process can be divided into two main parts. First is the immobilization of known gene sequences onto glass slides or other solid support followed by hybridization of the fluorescently labelled cDNA (comprising the sequences to be interrogated) to the known genes immobilized on the glass slide. After hybridization, arrays are scanned using a fluorescent microarray scanner. Analyzing the relative fluorescent intensity of different genes provides a measure of the differences in gene expression.

[0261] DNA arrays can be generated by immobilizing presynthesized oligonucleotides onto prepared glass slides. In this case, representative gene sequences are manufactured and prepared using standard oligonucleotide synthesis and purification methods. These synthesized gene sequences are complementary to the genes of interest (such as PITX2 or other genes according to Table 111) and tend to be shorter sequences in the range of 25-70 nucleotides. Alternatively, immobilized oligos can be chemically synthesized in situ on the surface of the slide. In situ oligonucleotide synthesis involves the consecutive addition of the appropriate nucleotides to the spots on the microarray; spots not receiving a nucleotide are protected during each stage of the process using physical or virtual masks.

[0262] In expression profiling microarray experiments, the RNA templates used are representative of the transcription profile of the cells or tissues under study. RNA is first isolated from the cell populations or tissues to be compared. Each RNA sample is then used as a template to generate fluorescently labelled cDNA via a reverse transcription reaction. Fluorescent labeling of the cDNA can be accomplished by either direct labeling or indirect labeling methods. During direct labeling, fluorescently modified nucleotides (e.g., Cy®3- or Cy®5-dCTP) are incorporated directly into the cDNA during the reverse transcription. Alternatively, indirect labeling can be achieved by incorporating aminoalkyl-modified nucleotides during cDNA synthesis and then conjugating an N-hydroxysuccinimide (NHS)-ester dye to the aminoalkyl-modified cDNA after the reverse transcription reaction is complete. Alternatively, the probe may be unlabelled, but may be detectable by specific binding with a ligand which is labelled, either directly or indirectly. Suitable labels and methods for labelling ligands (and probes) are known in the art, and include, for example, radioactive labels which may be incorporated by known methods (e.g., nick translation or kinasing). Other suitable labels include but are not limited to biotin, fluorescent groups, chemiluminescent groups (e.g., dioxetanes, particularly triggered dioxetanes), enzymes, antibodies, and the like.

[0263] To perform differential gene expression analysis, cDNA generated from different RNA samples are labelled with Cy®3. The resulting labelled cDNA is purified to remove unincorporated nucleotides, free dye and residual RNA. Following purification, the labeled cDNA samples are hybridised to the microarray. The stringency of hybridisation is determined by a number of factors during hybridisation and during the washing procedure, including temperature, ionic strength, length of time and concentration of formamide.

[0264] These factors are outlined in, for example, Sambrook et al. (Molecular Cloning: A Laboratory Manual, 2nd ed., 1989). The microarray is scanned post-hybridization using a fluorescent microarray scanner. The fluorescent intensity of each spot indicates the level of expression for that gene; bright spots correspond to strongly expressed genes, while dim spots indicate weak expression.

[0265] Once the images are obtained, the raw data must be analyzed. First, the background fluorescence must be subtracted from the fluorescence of each spot. The data is then normalized to a control sequence, such as an exogenously added RNA, or a housekeeping gene panel to account for any nonspecific hybridization, array imperfections or variability in the array setup, cDNA labeling, hybridization or washing. Data normalization allows the results of multiple arrays to be compared.

[0266] The present invention further provides for methods for the detection of the presence of the polypeptide encoded by said gene sequences in a sample obtained from a patient.

[0267] Aberrant levels of polypeptide expression of the polypeptides encoded by the gene according to Table 11 (in particular FOXL2, HIST2H2BF and GPR7 and most preferably PITX2) are associated with prostate cancer prognosis and/or treatment outcome.

[0268] Any method known in the art for detecting polypeptides can be used. Such methods include, but are not limited to mass-spectrometry, immunodiffusion, immunoelectrophoresis, immunochemical methods, binder-ligand assays, immunohistochemical techniques, agglutination and complement assays (e.g., see Basic and Clinical Immunology, Sites and Terr, eds., Appleton & Lange, Norwalk, Conn. pp 217-262, 1991 which is incorporated by reference). Preferred are binder-ligand immunoassay methods including reacting antibodies with an epitope or epitopes and competitively displacing a labelled polypeptide or derivative thereof.

[0269] Certain embodiments of the present invention comprise the use of antibodies specific to the polypeptide encoded by the a gene selected from Table 11, preferably FOXL2, HIST2H2BF or GPR7 and most preferably PITX2.

[0270] Such antibodies are useful for prostate cancer prognostic and/or predictive applications. In certain embodiments production of monoclonal or polyclonal antibodies can be induced by the use of the coded polypeptide as an antigene. Such antibodies may in turn be used to detect expressed polypeptides as markers for prostate cancer prognosis. The levels of such polypeptides present may be quantified by conventional methods. Antibody-polypeptide binding may be detected and quantified by a variety of means known in the art, such as labelling with fluorescent or radioactive ligands. The invention further comprises kits for performing the above-mentioned procedures, wherein such kits contain antibodies specific for the investigated polypeptides.

[0271] Numerous competitive and non-competitive polypeptide binding immunoassays are well known in the art. Antibodies employed in such assays may be unlabelled, for example as used in agglutination tests, or labelled for use a wide variety of assay methods. Labels that can be used include radionuclides, enzymes, fluorescers, chemiluminescers, enzyme substrates or co-factors, enzyme inhibitors, particles, dyes and the like. Preferred assays include but are not limited to radioimmunoassay (RIA), enzyme immunoassays, e.g., enzyme-linked immunosorbent assay (ELISA), fluorescent immunoassays and the like. Polyclonal or monoclonal antibodies or epitopes thereof can be made for use in immunoassays by any of a number of methods known in the art.

[0272] In an alternative embodiment of the method the proteins may be detected by means of western blot analysis. Said analysis is standard in the art, briefly proteins are separated by means of electrophoresis e.g. SDS-PAGE. The separated proteins are then transferred to a suitable membrane (or paper) e.g. nitrocellulose, retaining the special separation achieved by electrophoresis. The membrane is then incubated with a generic protein (e.g. milk protein) to bind remaining sticky places on the membrane. An antibody specific to the protein of interest is then added, said antibody being detectably labelled for example by dyes or enzymatic means (e.g. alkaline phosphatase or horseradish peroxidase) The location of the antibody on the membrane is then detected.

[0273] In an alternative embodiment of the method the proteins may be detected by means of immunohistochemistry (the use of antibodies to probe specific antigens in a sample). Said analysis is standard in the art, wherein detection of antigens in tissues is known as immunohistochemistry, while detection in cultured cells is generally termed immunocytochemistry. Briefly the primary antibody to be detected by binding to its specific antigen. The antibody-antigen complex is then bound by a secondary enzyme conjugated antibody. In the presence of the necessary substrate and chromogen the bound enzyme is detected according to coloured deposits at the antibody-antigen binding sites. There is a wide range of suitable sample types, antigen-antibody affinity, antibody types, and detection enhancement methods. Thus optimal conditions for immunohistochemical or immunocytochemical detection must be determined by the person skilled in the art for each individual case.

[0274] One approach for preparing antibodies to a polypeptide is the selection and preparation of an amino acid sequence of all or part of the polypeptide, chemically synthesising the amino acid sequence and injecting it into an appropriate animal, usually a rabbit or a mouse (Milstein and Kohler Nature 256:495-497, 1975; Gulfre and Milstein, Methods in Enzymology: Immunochemical Techniques 73:146, Langone and Banatis eds., Academic Press, 1981 which are incorporated by reference). Methods for preparation of the polypeptides or epitopes thereof include, but are not limited to chemical synthesis, recombinant DNA techniques or isolation from biological samples.

[0275] In a particularly preferred embodiment the expression level of the genes, genomic sequences and/or regulatory regions according to Table 11 is determined by analysis of the level of methylation of said genes, genomic sequences and/or regulatory regions thereof. It is preferred that the level of methylation of said genes, genomic sequences and/or regulatory regions thereof is determined by determining the methylation status or level of at least one CpG dinucleotide thereof. It is further preferred that the level of methylation of said genes, genomic sequences and/or regulatory regions thereof is determined by determining the methylation status or level of a plurality of CpG dinucleotides thereof. It is particularly preferred that said genes, genomic sequences and/or regulatory regions are selected from the group consisting PITX2, SEQ ID NO: 63, GPR7 and SEQ ID NO: 35. Further preferred is the gene PITX2. Said analysis comprises the following steps:

[0276] i) contacting genomic DNA obtained from the subject with at least one reagent, or series of reagents that distinguishes between methylated and non-methylated CpG dinucleotides within at least one target region of the genomic DNA, wherein said contiguous nucleotides comprise at least one CpG dinucleotide sequence; and

[0277] ii) classifying the prostate cell proliferative disorders according to its prognosis as determined from the methylation status of said target regions analysed in i).

[0278] Genomic DNA may be isolated by any means standard in the art, including the use of commercially available kits. Briefly, wherein the DNA of interest is encapsulated in by a cellular membrane the biological sample must be disrupted and lysed by enzymatic, chemical or mechanical means. The DNA solution may then be cleared of proteins and other contaminants e.g. by digestion with proteinase K. The genomic DNA is then recovered from the solution. This may be carried out by means of a variety of methods including salting out, organic extraction or binding of the DNA to a solid phase support. The choice of method will be affected by several factors including time, expense and required quantity of DNA. Preferably, the source of the DNA sample is selected from the group consisting of cells or cell lines, histological slides, biopsies, paraffin-embedded tissue, bodily fluids, ejaculate, urine, blood, and combinations thereof. Preferably, the source is biopsies, bodily fluids, ejaculate, urine, or blood. The genomic DNA sample is then treated in such a manner that cytosine bases which are unmethylated at the 5′-position are converted to uracil, thymine, or another base which is dissimilar to cytosine in terms of hybridization behavior. This will be understood as ‘treatment’ herein.

[0279] The above described treatment of genomic DNA is preferably carried out with bisulfite (hydrogen sulfite, disulfite) and subsequent alkaline hydrolysis which results in a conversion of non-methylated cytosine nucleobases to uracil or to another base which is dissimilar to cytosine in terms of base pairing behavior.

[0280] The treated DNA is then analysed in order to determine the methylation state of one or more target gene sequences (prior to the treatment) associated with the development of prostate carcinoma. It is particularly preferred that the target region comprises, or hybridizes under stringent conditions to at least 16 contiguous nucleotides of at least one gene or genomic sequence selected from the group consisting the genes and genomic sequences as listed in Table 11. It is particularly preferred that said gene or genomic sequence is selected from the group consisting PITX2, SEQ ID NO: 63, GPR7 and SEQ ID NO: 35. Further preferred is the gene PITX2. It is further preferred that the sequences of said genes as described in the accompanying sequence listing are analysed. The method of analysis may be selected from those known in the art, including those listed herein. Particularly preferred are MethyLight™, MSP™ and the use of blocking oligonucleotides as will be described herein. It is further preferred that any oligonucleotides used in such analysis (including primers, blocking oligonucleotides and detection probes) should be reverse complementary, identical, or hybridize under stringent or highly stringent conditions to an at least 16-base-pair long segment of the base sequences of one or more of SEQ ID NO:65 to SEQ ID NO:320 and SEQ ID NO: 962 to SEQ ID NO: 965 and sequences complementary thereto. It is preferred that any oligonucleotides used in such analysis (including primers, blocking oligonucleotides and detection probes) should be reverse complementary, identical, or hybridize under stringent or highly stringent conditions to an at least 16-base-pair long segment of the base sequences of one or more of SEQ ID Nos: 133, 134, 261, 262, 189, 190, 317, 318, 101, 102, 229, 230 and most preferably SEQ ID Nos: 962-965 and sequences complementary thereto

[0281] Aberrant methylation, of one or more genes or genomic sequences taken from those listed in Table 11, and more preferably the genes or genomic sequences according to PITX2, SEQ ID NO: 63, GPR7 and SEQ ID NO: 35 are associated with the prognosis of prostate cell proliferative disorders. Analysis of one or a plurality of the sequences enables the prognostic classification of prostate cell proliferative disorders. More preferably hypermethylation of one or more of said genes or genomic sequences is associated with poor prognosis. Hypermethylation is in general associated with under expression of mRNA and accordingly polypeptides.

[0282] In one embodiment the method discloses the use of one or more genes or genomic sequences selected from the group consisting the genes according to Table 11 as markers for providing a prognosis of prostate cell proliferative disorders. It is particularly preferred that said gene or genomic sequence is selected from the group consisting PITX2, SEQ ID NO: 63, GPR7 and SEQ ID NO: 35. Further preferred is the gene PITX2.

[0283] Said use of the genes and/or sequences may be enabled by means of any analysis of the expression of the gene, by means of mRNA expression analysis or protein expression analysis. However, in the most preferred embodiment of the invention, the detection of prostate cell proliferative disorders is enabled by means of analysis of the methylation status of said genes or genomic sequences and their promoter or regulatory elements. Methods for the methylation analysis of genes are described herein.

[0284] In one embodiment the method discloses the use of one or more genes or genomic sequences selected from the group consisting of the genes according to Table 11 as markers for providing a prognosis of prostate cell proliferative disorders. It is particularly preferred that said gene or genomic sequence is selected from the group consisting PITX2, SEQ ID NO: 63, GPR7 and SEQ ID NO: 35. Further preferred is the gene PITX2.

[0285] Said use of the genes and/or sequences may be enabled by means of any analysis of the expression of the gene, by means of mRNA expression analysis or protein expression analysis. However, in the most preferred embodiment of the invention, the detection of prostate cell proliferative disorders is enabled by means of analysis of the methylation status of said genes or genomic sequences and their promoter or regulatory elements. Methods for the methylation analysis of genes are described herein.

[0286] Aberrant levels of mRNA expression of the genes, genomic sequences or genes regulated by genomic sequences according to Table 11 are associated with prognosis of prostate cell proliferative disorders. Accordingly, increased or decreased levels of expression of said genes or sequences are associable with factors associated with the prognosis of prostate cell proliferative disorders, including but not limited to disease agressivity and progression. It is particularly preferred that said gene or genomic sequence is selected from the group consisting PITX2, SEQ ID NO: 63, GPR7 and SEQ ID NO: 35. Further preferred is the gene PITX2.

[0287] To detect the presence of mRNA encoding a gene or genomic sequence in a prognostic classification of prostate cell proliferative disorders, a sample is obtained from a patient. Preferably, the source of the sample is selected from the group consisting of cells or cell lines, histological slides, biopsies, paraffin-embedded tissue, bodily fluids, ejaculate, urine, blood, and combinations thereof. Preferably, the source is biopsies, bodily fluids, ejaculate, urine, or blood. The sample may be treated to extract the nucleic acids contained therein. The resulting nucleic acid from the sample is subjected to gel electrophoresis or other separation techniques. Detection involves contacting the nucleic acids and in particular the mRNA of the sample with a DNA sequence serving as a probe to form hybrid duplexes. The stringency of hybridisation is determined by a number of factors during hybridisation and during the washing procedure, including temperature, ionic strength, length of time and concentration of formamide. These factors are outlined in, for example, Sambrook et al. (Molecular Cloning: A Laboratory Manual, 2d ed., 1989). Detection of the resulting duplex is usually accomplished by the use of labelled probes. Alternatively, the probe may be unlabeled, but may be detectable by specific binding with a ligand which is labelled, either directly or indirectly. Suitable labels and methods for labelling probes and ligands are known in the art, and include, for example, radioactive labels which may be incorporated by known methods (e.g., nick translation or kinasing), biotin, fluorescent groups, chemiluminescent groups (e.g., dioxetanes, particularly triggered dioxetanes), enzymes, antibodies, and the like.

[0288] To increase the sensitivity of the detection in a sample of mRNA transcribed from the gene or genomic sequence, the technique of reverse transcription/polymerisation chain reaction can be used to amplify cDNA transcribed from the mRNA. The method of reverse transcription IPCR is well known in the art (for example, see Watson and Fleming, supra).

[0289] The reverse transcription/PCR method can be performed as follows. Total cellular RNA is isolated by, for example, the standard guanidium isothiocyanate method and the total RNA is reverse transcribed. The reverse transcription method involves synthesis of DNA on a template of RNA using a reverse transcriptase enzyme and a 3′ end primer. Typically, the primer contains an oligo(dT) sequence. The cDNA thus produced is then amplified using the PCR method and EYA4 specific primers. (Belyavsky et al, Nucl Acid Res 17:2919-2932, 1989; Krug and Berger, Methods in Enzymology, Academic Press, N.Y., Vol. 152, pp. 316-325, 1987 which are incorporated by reference).

[0290] The present invention may also be described in certain embodiments as a kit for use in providing a prognosis of a prostate cell proliferative disorder state through testing of a biological sample. A representative kit may comprise one or more nucleic acid segments that selectively hybridise to the mRNA and a container for each of the one or more nucleic acid segments. In certain embodiments the nucleic acid segments may be combined in a single tube. In further embodiments, the nucleic acid segments may also include a pair of primers for amplifying the target mRNA. Such kits may also include any buffers, solutions, solvents, enzymes, nucleotides, or other components for hybridisation, amplification or detection reactions. Preferred kit components include reagents for reverse transcription-PCR, in situ hybridisation, Northern analysis and/or RPA.

[0291] Particular embodiments of the present invention provide a novel application of the analysis of methylation levels and/or patterns within said sequences that enables a prognostic classification and thereby improved treatment of prostate cell proliferative disorders. Treatment of prostate cell proliferative disorders is directly linked. With disease prognosis in particular aggressiveness, and the disclosed method thereby enables the physician and patient to make better and more informed treatment decisions.

### Further Improvements

[0292] The present invention provides novel uses for genomic sequences selected from the group consisting of SEQ ID NO:1 TO SEQ ID NO:64 AND SEQ ID NO: 961 (preferably SEQ ID Nos: 35, 63, 19 and most preferably SEQ ID NO: 961). Additional embodiments provide modified variants of SEQ ID NO:1 TO SEQ ID NO:64 AND SEQ ID NO: 961, as well as oligonucleotides and/or PNA-oligomers for analysis of cytosine methylation patterns within the group consisting SEQ ID NO:1 TO SEQ ID NO:64 AND SEQ ID NO: 961 (preferably SEQ ID Nos: 35, 63, 19 and most preferably SEQ ID NO: 961).

[0293] An objective of the invention comprises analysis of the methylation state of one or more CpG dinucleotides within at least one of the genomic sequences selected from the group consisting of SEQ ID NO:1 TO SEQ ID NO:64 AND SEQ ID NO: 961 and sequences complementary thereto. Preferably said group consists of SEQ ID Nos: 35, 63, 19 and most preferably said sequence is SEQ ID NO: 961.

[0294] The disclosed invention provides treated nucleic acids, derived from genomic SEQ ID NO:1 to SEQ ID NO:64 and SEQ ID NO: 961 (preferably SEQ ID Nos: 35, 63, 19 and most preferably SEQ ID NO: 961), wherein the treatment is suitable to convert at least one unmethylated cytosine base of the genomic DNA sequence to uracil or another base that is detectably dissimilar to cytosine in terms of hybridization. The genomic sequences in question may comprise one, or more, consecutive or random methylated CpG positions. Said treatment preferably comprises use of a reagent selected from the group consisting of bisulfite, hydrogen sulfite, disulfite, and combinations thereof. In a preferred embodiment of the invention, the objective comprises analysis of a non-naturally occurring modified nucleic acid comprising a sequence of at least 16 contiguous nucleotide bases in length of a sequence selected from the group consisting of SEQ ID NO: 65 TO SEQ ID NO: 320 AND SEQ ID Nos: 962-965 (preferably said group consists of SEQ ID Nos: 133, 134, 261, 262, 189, 190, 317, 318, 101, 102, 229, 230 and most preferably said group consists of SEQ ID Nos: 962-965). Particularly preferred is a non-naturally occurring modified nucleic acid comprising a sequence of at least 16 contiguous nucleotide bases in length of a sequence selected from the group consisting of SEQ ID NO: 65 to SEQ ID NO: 320 and SEQ ID NO: 962 to SEQ ID NO: 965 that is not identical to or complementary to SEQ ID NO: 1 to SEQ ID NO: 64 and SEQ ID NO: 961 or other human genomic DNA. Further preferred is a non-naturally occurring modified nucleic acid comprising a sequence of at least 16 contiguous nucleotide bases in length of a sequence selected from the group consisting of SEQ ID Nos: 133, 134, 261, 262, 189, 190, 317, 318, 101, 102, 229, 230, 962-965 that is not identical to or complementary to SEQ ID Nos: 961, 35, 63 and 19 or other human genomic DNA.

[0295] It is further preferred that said sequence comprises at least one CpG, TpA or CpA dinucleotide and sequences complementary thereto. The sequences of SEQ ID NO:65 TO SEQ ID NO:320 AND SEQ ID NO: 962 TO SEQ ID NO: 965 provide non-naturally occurring modified versions of the nucleic acid according to SEQ ID NO:1 TO SEQ ID NO:64 AND SEQ ID NO: 961, wherein the modification of each genomic sequence results in the synthesis of a nucleic acid having a sequence that is unique and distinct from said genomic sequence as follows. For each sense strand genomic DNA, e.g., SEQ ID NO:1, four converted versions are disclosed. A first version wherein “C” is converted to “T,” but “CpG” remains “CpG” (i.e., corresponds to case where, for the genomic sequence, all “C” residues of CpG dinucleotide sequences are methylated and are thus not converted); a second version discloses the complement of the disclosed genomic DNA sequence (i.e. antisense strand), wherein “C” is converted to “T,” but “CpG” remains “CpG” (i.e., corresponds to case where, for all “C” residues of CpG dinucleotide sequences are methylated and are thus not converted). The ‘upmethylated’ converted sequences of SEQ ID NO:1 to SEQ ID NO:64 and SEQ ID NO: 961 correspond to SEQ ID NO:65 to SEQ ID NO:728. A third chemically converted version of each genomic sequences is provided, wherein “C” is converted to “T” for all “C” residues, including those of “CpG” dinucleotide sequences (i.e., corresponds to case where, for the genomic sequences, all “C” residues of CpG dinucleotide sequences are unmethylated); a final chemically converted version of each sequence, discloses the complement of the disclosed genomic DNA sequence (i.e. antisense strand), wherein “C” is converted to “T” for all “C” residues, including those of “CpG” dinucleotide sequences (i.e., corresponds to case where, for the complement (antisense strand) of each genomic sequence, all “C” residues of CpG dinucleotide sequences are unmethylated). The ‘downmethylated’ converted sequences of SEQ ID NO:1 to SEQ ID NO:64 and SEQ ID NO: 961 correspond to SEQ ID NO:65 to SEQ ID NO:320 and SEQ ID NO: 962 to SEQ ID NO: 965.

[0296] In an alternative preferred embodiment, such analysis comprises the use of an oligonucleotide or oligomer for detecting the cytosine methylation state within genomic or treated (chemically modified) DNA, according to SEQ ID NO:1 to SEQ ID NO:320 and SEQ ID NO: 961 to SEQ ID NO: 965. Said oligonucleotide or oligomer comprising a nucleic acid sequence having a length of at least nine (9) nucleotides which hybridizes, under moderately stringent or stringent conditions (as defined herein above), to a treated nucleic acid sequence according to SEQ ID NO:1 to SEQ ID NO:320 and SEQ ID NO: 961 to SEQ ID NO: 965 and/or sequences complementary thereto, or to a genomic sequence according to SEQ ID NO:1 to SEQ ID NO:64 and SEQ ID NO: 961 and/or sequences complementary thereto.

[0297] Thus, the present invention includes nucleic acid molecules (e.g., oligonucleotides and peptide nucleic acid (PNA) molecules (PNA-oligomers)) that hybridize under moderately stringent and/or stringent hybridization conditions to all or a portion of the sequences SEQ ID NO: 1 to SEQ ID NO: 320 and SEQ ID NO: 961 to 965, or to the complements thereof. Particularly preferred is a nucleic acid molecule that hybridizes under moderately stringent and/or stringent hybridization conditions to all or a portion of the sequences SEQ ID NO: 65 to SEQ ID NO: 320 and SEQ ID NO: 962 to SEQ ID NO: 965 but is not identical to or complementary to SEQ ID NO: 1 to SEQ ID NO: 64 and SEQ ID NO: 961 or other human genomic DNA. Further preferred is a nucleic acid molecule that hybridizes under moderately stringent and/or stringent hybridization conditions to all or a portion of the sequences SEQ ID Nos: 133, 134, 261, 262, 189, 190, 317, 318, 101, 102, 229, 230, 962-965 but is not identical to or complementary to SEQ ID Nos: 961, 35, 63 and 19 or other human genomic DNA.

[0298] The hybridizing portion of the hybridizing nucleic acids is typically at least 9, 15, 20, 25, 30 or 35 nucleotides in length. However, longer molecules have inventive utility, and are thus within the scope of the present invention.

[0299] Preferably, the hybridizing portion of the inventive hybridizing nucleic acids is at least 95%, or at least 98%, or 100% identical to the sequence, or to a portion thereof of SEQ ID NO: 1 to SEQ ID NO: 320 and SEQ ID NO: 961 to 965, or to the complements thereof.

[0300] Hybridizing nucleic acids of the type described herein can be used, for example, as a primer (e.g., a PCR primer), or a diagnostic and/or prognostic probe or primer. Preferably, hybridization of the oligonucleotide probe to a nucleic acid sample is performed under stringent conditions and the probe is 100% identical to the target sequence. Nucleic acid duplex or hybrid stability is expressed as the melting temperature or Tm, which is the temperature at which a probe dissociates from a target DNA. This melting temperature is used to define the required stringency conditions.

[0301] For target sequences that are related and substantially identical to the corresponding sequence of SEQ ID NO:1 to SEQ ID NO:64 and SEQ ID NO: 961 (such as allelic variants and SNPs), rather than identical, it is useful to first establish the lowest temperature at which only homologous hybridization occurs with a particular concentration of salt (e.g., SSC or SSPE). Then, assuming that 1% mismatching results in a 1° C. decrease in the Tm, the temperature of the final wash in the hybridization reaction is reduced accordingly (for example, if sequences having >95% identity with the probe are sought, the final wash temperature is decreased by 5° C.). In practice, the change in Tm can be between 0.5° C. and 1.5° C. per 1% mismatch.

[0302] Examples of inventive oligonucleotides of length X (in nucleotides), as indicated by polynucleotide positions with reference to, e.g., SEQ ID NO:1, include those corresponding to sets (sense and antisense sets) of consecutively overlapping oligonucleotides of length X, where the oligonucleotides within each consecutively overlapping set (corresponding to a given X value) are defined as the finite set of Z oligonucleotides from nucleotide positions:

[0303] n to (n+(X−1));

[0304] where n=1, 2, 3, . . . (Y−(X−1));

[0305] where Y equals the length (nucleotides or base pairs) of SEQ ID NO: 1 (7572);

[0306] where X equals the common length (in nucleotides) of each oligonucleotide in the set (e.g., X=20 for a set of consecutively overlapping 20-mers); and

[0307] where the number (Z) of consecutively overlapping oligomers of length X for a given SEQ ID NO of length Y is equal to Y−(X−1). For example Z=7572-19=7553 for either sense or antisense sets of SEQ ID NO:1, where X=20.

[0308] Preferably, the set is limited to those oligomers that comprise at least one CpG, TpG or CpA dinucleotide.

[0309] Examples of inventive 20-mer oligonucleotides include the following set of oligomers (and the antisense set complementary thereto), indicated by polynucleotide positions with reference to SEQ ID NO:1:

[0310] 1-20, 2-21, 3-22, 4-23, 5-24 . . . 7553-7572.

[0311] Preferably, the set is limited to those oligomers that comprise at least one CpG, TpG or CpA dinucleotide.

[0312] Likewise, examples of inventive 25-mer oligonucleotides include the following set of 2,256 oligomers (and the antisense set complementary thereto), indicated by polynucleotide positions with reference to SEQ ID NO:1:

[0313] 1-25, 2-26, 3-27, 4-28, 5-29, . . . 7553-7572.

[0314] Preferably, the set is limited to those oligomers that comprise at least one CpG, TpG or CpA dinucleotide.

[0315] The present invention encompasses, for each of SEQ ID NO:1 to SEQ ID NO:320 and SEQ ID NO: 961 to SEQ ID NO: 965 (sense and antisense), multiple consecutively overlapping sets of oligonucleotides or modified oligonucleotides of length X, where, e.g., X=9, 10, 17, 20, 22, 23, 25, 27, 30 or 35 nucleotides.

[0316] The oligonucleotides or oligomers according to the present invention constitute effective tools useful to ascertain genetic and epigenetic parameters of the genomic sequence corresponding to SEQ ID NO:1 to SEQ ID NO:64 and SEQ ID NO: 961. Preferred sets of such oligonucleotides or modified oligonucleotides of length X are those consecutively overlapping sets of oligomers corresponding to SEQ ID NO: 1 to SEQ ID NO:320 and SEQ ID NO: 961 to SEQ ID NO: 965 (and to the complements thereof). Preferably, said oligomers comprise at least one CpG, TpG or CpA dinucleotide.

[0317] Particularly preferred oligonucleotides or oligomers according to the present invention are those in which the cytosine of the CpG dinucleotide (or of the corresponding converted TpG or CpA dinucleotide) sequences is within the middle third of the oligonucleotide; that is, where the oligonucleotide is, for example, 13 bases in length, the CpG, TpG or CpA dinucleotide is positioned within the fifth to ninth nucleotide from the 5′-end.

[0318] The oligonucleotides of the invention can also be modified by chemically linking the oligonucleotide to one or more moieties or conjugates to enhance the activity, stability or detection of the oligonucleotide. Such moieties or conjugates include chromophores, fluorophors, lipids such as cholesterol, cholic acid, thioether, aliphatic chains, phospholipids, polyamines, polyethylene glycol (PEG), palmityl moieties, and others as disclosed in, for example, U.S. Pat. Nos. 5,514,758, 5,565,552, 5,567,810, 5,574,142, 5,585,481, 5,587,371, 5,597,696 and 5,958,773. The probes may also exist in the form of a PNA (peptide nucleic acid) which has particularly preferred pairing properties. Thus, the oligonucleotide may include other appended groups such as peptides, and may include hybridization-triggered cleavage agents (Krol et al., BioTechniques 6:958-976, 1988) or intercalating agents (Zon, Pharm. Res. 5:539-549, 1988). To this end, the oligonucleotide may be conjugated to another molecule, e.g., a chromophore, fluorophor, peptide, hybridization-triggered cross-linking agent, transport agent, hybridization-triggered cleavage agent, etc.

[0319] The oligonucleotide may also comprise at least one art-recognized modified sugar and/or base moiety, or may comprise a modified backbone or non-natural internucleoside linkage.

[0320] The oligonucleotides or oligomers according to particular embodiments of the present invention are typically used in ‘sets,’ which contain at least one oligomer for analysis of at least one of the CpG dinucleotides of genomic sequences SEQ ID NO:1 to SEQ ID NO:64 and SEQ ID NO: 961 and sequences complementary thereto, or to the corresponding CpG, TpG or CpA dinucleotide within a sequence of the treated nucleic acids according to SEQ ID NO:65 to SEQ ID NO:320 and SEQ ID NO: 962 to SEQ ID NO: 965 and sequences complementary thereto. However, it is anticipated that for economic or other factors it may be preferable to analyze a limited selection of the CpG dinucleotides within said sequences, and the content of the set of oligonucleotides is altered accordingly.

[0321] Therefore, in particular embodiments, the present invention provides a set of at least two (2) (oligonucleotides and/or PNA-oligomers) useful for detecting the cytosine methylation state in treated genomic DNA (SEQ ID NO: 65 to SEQ ID NO:320 and SEQ ID NO: 962 to SEQ ID NO: 965), or in genomic DNA (SEQ ID NO:1 to SEQ ID NO:64 and SEQ ID NO: 961 and sequences complementary thereto). These probes enable diagnosis and/or classification of genetic and epigenetic parameters of prostate cell proliferative disorders. The set of oligomers may also be used for detecting single nucleotide polymorphisms (SNPs) in treated genomic DNA (SEQ ID NO:65 to SEQ ID NO:320 and SEQ ID NO: 962 to SEQ ID NO: 965), or in genomic DNA (SEQ ID NO:1 to SEQ ID NO:64 and SEQ ID NO: 961 and sequences complementary thereto).

[0322] In preferred embodiments, at least one, and more preferably all members of a set of oligonucleotides is bound to a solid phase.

[0323] In further embodiments, the present invention provides a set of at least two (2) oligonucleotides that are used as ‘primer’ oligonucleotides for amplifying DNA sequences of one of SEQ ID NO:1 to SEQ ID NO:320 and SEQ ID NO: 961 to SEQ ID NO: 965 and sequences complementary thereto, or segments thereof.

[0324] It is anticipated that the oligonucleotides may constitute all or part of an “array” or “DNA chip” (i.e., an arrangement of different oligonucleotides and/or PNA-oligomers bound to a solid phase). Such an array of different oligonucleotide- and/or PNA-oligomer sequences can be characterized, for example, in that it is arranged on the solid phase in the form of a rectangular or hexagonal lattice. The solid-phase surface may be composed of silicon, glass, polystyrene, aluminum, steel, iron, copper, nickel, silver, or gold. Nitrocellulose as well as plastics such as nylon, which can exist in the form of pellets or also as resin matrices, may also be used. An overview of the Prior Art in oligomer array manufacturing can be gathered from a special edition of Nature Genetics (Nature Genetics Supplement, Volume 21, January 1999, and from the literature cited therein). Fluorescently labeled probes are often used for the scanning of immobilized DNA arrays. The simple attachment of Cy3 and Cy5 dyes to the 5-OH of the specific probe are particularly suitable for fluorescence labels. The detection of the fluorescence of the hybridized probes may be carried out, for example, via a confocal microscope. Cy3 and Cy5 dyes, besides many others, are commercially available.

[0325] It is also anticipated that the oligonucleotides, or particular sequences thereof, may constitute all or part of an “virtual array” wherein the oligonucleotides, or particular sequences thereof, are used, for example, as ‘specifiers’ as part of, or in combination with a diverse population of unique labeled probes to analyze a complex mixture of analytes. Such a method, for example is described in US 2003/0013091 (U.S. Ser. No. 09/898,743, published 16 Jan. 2003). In such methods, enough labels are generated so that each nucleic acid in the complex mixture (i.e., each analyte) can be uniquely bound by a unique label and thus detected (each label is directly counted, resulting in a digital read-out of each molecular species in the mixture).

[0326] It is particularly preferred that the oligomers according to the invention are utilised for at least one of: prognosis of; treatment of; monitoring of; and treatment and monitoring of prostate cell proliferative disorders. This is enabled by use of said sets for providing a prognosis of a biological sample isolated from a patient. Particularly preferred are those sets of oligomer that comprise at least two oligonucleotides selected from one of the following sets of oligonucleotides.

[0327] In one embodiment of the method, this is achieved by analysis of the methylation status of at least one target sequence comprising, or hybridizing under stringent conditions to at least 16 contiguous nucleotides of a gene or sequence selected from the group consisting the genes and sequences according to Table 11 and complements thereof. It is particularly preferred that said gene or genomic sequence is selected from the group consisting PITX2, SEQ ID NO: 63, GPR7 and SEQ ID NO: 35 and their sequences as listed in the accompanying sequence listing. Further preferred is the gene PITX2.

[0328] The present invention further provides a method for ascertaining genetic and/or epigenetic parameters of the genomic sequences according to SEQ ID NO:1 to SEQ ID NO:64 and SEQ ID NO: 961 within a subject by analyzing cytosine methylation and single nucleotide polymorphisms. In a preferred embodiment the present invention further provides a method for ascertaining genetic and/or epigenetic parameters of the genomic sequences according to SEQ ID Nos: 35, 63, 19 and most preferably SEQ ID NO. 961 within a subject by analyzing cytosine methylation and single nucleotide polymorphisms. Said method comprising contacting a nucleic acid comprising one or more of SEQ ID NO:1 to SEQ ID NO:64 and SEQ ID NO: 961 (preferably one or more of SEQ ID Nos: 35, 63, 19 and most preferably SEQ ID NO: 961) in a biological sample obtained from said subject with at least one reagent or a series of reagents, wherein said reagent or series of reagents, distinguishes between methylated and non-methylated CpG dinucleotides within the target nucleic acid.

[0329] Preferably, said method comprises the following steps: In the first step, a sample of the tissue to be analysed is obtained. The source may be any suitable source. Preferably, the source of the DNA sample is selected from the group consisting of cells or cell lines, histological slides, biopsies, paraffin-embedded tissue, bodily fluids, ejaculate, urine, blood, and combinations thereof. Preferably, the source is biopsies, bodily fluids, ejaculate, urine, or blood.

[0330] The genomic DNA is then isolated from the sample. Genomic DNA may be isolated by any means standard in the art, including the use of commercially available kits. Briefly, wherein the DNA of interest is encapsulated in by a cellular membrane the biological sample must be disrupted and lysed by enzymatic, chemical or mechanical means. The DNA solution may then be cleared of proteins and other contaminants e.g. by digestion with proteinase K. The genomic DNA is then recovered from the solution. This may be carried out by means of a variety of methods including salting out, organic extraction or binding of the DNA to a solid phase support. The choice of method will be affected by several factors including time, expense and required quantity of DNA.

[0331] Once the nucleic acids have been extracted, the genomic double stranded DNA is used in the analysis.

[0332] In the second step of the method, the genomic DNA sample is treated in such a manner that cytosine bases which are unmethylated at the 5′-position are converted to uracil, thymine, or another base which is dissimilar to cytosine in terms of hybridization behavior. This will be understood as ‘pretreatment’ or ‘treatment’ herein.

[0333] The above-described treatment of genomic DNA is preferably carried out with bisulfite (hydrogen sulfite, disulfite) and subsequent alkaline hydrolysis which results in a conversion of non-methylated cytosine nucleobases to uracil or to another base which is dissimilar to cytosine in terms of base pairing behavior.

[0334] In the third step of the method, fragments of the treated DNA are amplified, using sets of primer oligonucleotides according to the present invention, and an amplification enzyme. The amplification of several DNA segments can be carried out simultaneously in one and the same reaction vessel. Typically, the amplification is carried out using a polymerase chain reaction (PCR). The set of primer oligonucleotides includes at least two oligonucleotides whose sequences are each reverse complementary, identical, or hybridize under stringent or highly stringent conditions to an at least 16-base-pair long segment of the base sequences of one of SEQ ID NO:65 to SEQ ID NO:320 and SEQ ID NO: 962 to SEQ ID NO: 965 (preferably one of SEQ ID Nos: 133, 134, 261, 262, 189, 190, 317, 318, 101, 102, 229, 230 and most preferably one of SEQ ID Nos: 962-965) and sequences complementary thereto.

[0335] In an alternate embodiment of the method, the methylation status of preselected CpG positions within the nucleic acid sequences comprising one or more of SEQ ID NO:1 to SEQ ID NO:64 and SEQ ID NO. 961 (preferably one or more of SEQ ID Nos: 35, 63, 19 and most preferably SEQ ID NO: 961) may be detected by use of methylation-specific primer oligonucleotides. This technique (MSP) has been described in U.S. Pat. No. 6,265,171 to Herman. The use of methylation status specific primers for the amplification of bisulfite treated DNA allows the differentiation between methylated and unmethylated nucleic acids. MSP primers pairs contain at least one primer which hybridizes to a bisulfite treated CpG dinucleotide. Therefore, the sequence of said primers comprises at least one CpG dinucleotide. MSP primers specific for non-methylated DNA contain a “T” at the position of the C position in the CpG. Preferably, therefore, the base sequence of said primers is required to comprise a sequence having a length of at least 9 nucleotides which hybridizes to a treated nucleic acid sequence according to one of SEQ ID NO: 65 to SEQ ID NO: 320 and SEQ ID NO: 961 to 965 (preferably SEQ ID Nos: 133, 134, 261, 262, 189, 190, 317, 318, 101, 102, 229, 230 and most preferably SEQ ID Nos: 962-965) and sequences complementary thereto, wherein the base sequence of said oligomers comprises at least one CpG dinucleotide.

[0336] A further preferred embodiment of the method comprises the use of blocker oligonucleotides. The use of such blocker oligonucleotides has been described by Yu et al., BioTechniques 23:714-720, 1997. Blocking probe oligonucleotides are hybridized to the bisulfite treated nucleic acid concurrently with the PCR primers. PCR amplification of the nucleic acid is terminated at the 5′ position of the blocking probe, such that amplification of a nucleic acid is suppressed where the complementary sequence to the blocking probe is present. The probes may be designed to hybridize to the bisulfite treated nucleic acid in a methylation status specific manner. For example, for detection of methylated nucleic acids within a population of unmethylated nucleic acids, suppression of the amplification of nucleic acids which are unmethylated at the position in question would be carried out by the use of blocking probes comprising a ‘CpA’ or ‘TpA’ at the position in question, as opposed to a ‘CpG’ if the suppression of amplification of methylated nucleic acids is desired.

[0337] For PCR methods using blocker oligonucleotides, efficient disruption of polymerase-mediated amplification requires that blocker oligonucleotides not be elongated by the polymerase. Preferably, this is achieved through the use of blockers that are 3′-deoxyoligonucleotides, or oligonucleotides derivatized at the 3′ position with other than a “free” hydroxyl group. For example, 3′-O-acetyl oligonucleotides are representative of a preferred class of blocker molecule.

[0338] Additionally, polymerase-mediated decomposition of the blocker oligonucleotides should be precluded. Preferably, such preclusion comprises either use of a polymerase lacking 5′-3′ exonuclease activity, or use of modified blocker oligonucleotides having, for example, thioate bridges at the 5′-termini thereof that render the blocker molecule nuclease-resistant. Particular applications may not require such 5′ modifications of the blocker. For example, if the blocker- and primer-binding sites overlap, thereby precluding binding of the primer (e.g., with excess blocker), degradation of the blocker oligonucleotide will be substantially precluded. This is because the polymerase will not extend the primer toward, and through (in the 5′-3′ direction) the blocker—a process that normally results in degradation of the hybridized blocker oligonucleotide.

[0339] A particularly preferred blocker/PCR embodiment, for purposes of the present invention and as implemented herein, comprises the use of peptide nucleic acid (PNA) oligomers as blocking oligonucleotides. Such PNA blocker oligomers are ideally suited, because they are neither decomposed nor extended by the polymerase.

[0340] Preferably, therefore, the base sequence of said blocking oligonucleotides is required to comprise a sequence having a length of at least 9 nucleotides which hybridizes to a treated nucleic acid sequence according to one of SEQ ID NO:65 to SEQ ID NO:320 and SEQ ID NO: 962 to SEQ ID NO: 965 and sequences complementary thereto, wherein the base sequence of said oligonucleotides comprises at least one CpG, TpG or CpA dinucleotide. More preferably the base sequence of said blocking oligonucleotides is required to comprise a sequence having a length of at least 9 nucleotides which hybridizes to a treated nucleic acid sequence according to one of preferably SEQ ID Nos: 133, 134, 261, 262, 189, 190, 317, 318, 101, 102, 229, 230 and most preferably SEQ ID Nos: 962-965 and sequences complementary thereto, wherein the base sequence of said oligonucleotides comprises at least one CpG, TpG or CpA dinucleotide.

[0341] The fragments obtained by means of the amplification can carry a directly or indirectly detectable label. Preferred are labels in the form of fluorescence labels, radionuclides, or detachable molecule fragments having a typical mass which can be detected in a mass spectrometer. Where said labels are mass labels, it is preferred that the labeled amplificates have a single positive or negative net charge, allowing for better detectability in the mass spectrometer. The detection may be carried out and visualized by means of, e.g., matrix assisted laser desorption/ionization mass spectrometry (MALDI) or using electron spray mass spectrometry (ESI).

[0342] Matrix Assisted Laser Desorption/Ionization Mass Spectrometry (MALDI-TOF) is a very efficient development for the analysis of biomolecules (Karas & Hillenkamp, Anal Chem., 60:2299-301, 1988). An analyte is embedded in a light-absorbing matrix. The matrix is evaporated by a short laser pulse thus transporting the analyte molecule into the vapour phase in an unfragmented manner. The analyte is ionized by collisions with matrix molecules. An applied voltage accelerates the ions into a field-free flight tube. Due to their different masses, the ions are accelerated at different rates. Smaller ions reach the detector sooner than bigger ones. MALDI-TOF spectrometry is well suited to the analysis of peptides and proteins. The analysis of nucleic acids is somewhat more difficult (Gut & Beck, Current Innovations and Future Trends, 1:147-57, 1995). The sensitivity with respect to nucleic acid analysis is approximately 100-times less than for peptides, and decreases disproportionately with increasing fragment size. Moreover, for nucleic acids having a multiply negatively charged backbone, the ionization process via the matrix is considerably less efficient. In MALDI-TOF spectrometry, the selection of the matrix plays an eminently important role. For desorption of peptides, several very efficient matrixes have been found which produce a very fine crystallisation. There are now several responsive matrixes for DNA, however, the difference in sensitivity between peptides and nucleic acids has not been reduced. This difference in sensitivity can be reduced, however, by chemically modifying the DNA in such a manner that it becomes more similar to a peptide. For example, phosphorothioate nucleic acids, in which the usual phosphates of the backbone are substituted with thiophosphates, can be converted into a charge-neutral DNA using simple alkylation chemistry (Gut & Beck, Nucleic Acids Res. 23: 1367-73, 1995). The coupling of a charge tag to this modified DNA results in an increase in MALDI-TOF sensitivity to the same level as that found for peptides. A further advantage of charge tagging is the increased stability of the analysis against impurities, which makes the detection of unmodified substrates considerably more difficult.

[0343] In the fourth step of the method, the amplificates obtained during the third step of the method are analysed in order to ascertain the methylation status of the CpG dinucleotides prior to the treatment.

[0344] In embodiments where the amplificates were obtained by means of MSP amplification, the presence or absence of an amplificate is in itself indicative of the methylation state of the CpG positions covered by the primer, according to the base sequences of said primer.

[0345] Amplificates obtained by means of both standard and methylation specific PCR may be further analyzed by means of hybridization-based methods such as, but not limited to, array technology and probe based technologies as well as by means of techniques such as sequencing and template directed extension.

[0346] In one embodiment of the method, the amplificates synthesised in step three are subsequently hybridized to an array or a set of oligonucleotides and/or PNA probes. In this context, the hybridization takes place in the following manner: the set of probes used during the hybridization is preferably composed of at least 2 oligonucleotides or PNA-oligomers; in the process, the amplificates serve as probes which hybridize to oligonucleotides previously bonded to a solid phase; the non-hybridized fragments are subsequently removed; said oligonucleotides contain at least one base sequence having a length of at least 9 nucleotides which is reverse complementary or identical to a segment of the base sequences specified in the present Sequence Listing; and the segment comprises at least one CpG TpG or CpA dinucleotide.

[0347] In a preferred embodiment, said dinucleotide is present in the central third of the oligomer. For example, wherein the oligomer comprises one CpG dinucleotide, said dinucleotide is preferably the fifth to ninth nucleotide from the 5′-end of a 13-mer. One oligonucleotide exists for the analysis of each CpG dinucleotide within the sequence according to SEQ ID NO:1 to SEQ ID NO:64 and SEQ ID NO. 961, and the equivalent positions within SEQ ID NO:65 to SEQ ID NO:320 and SEQ ID NO: 962 to SEQ ID NO: 965. Said oligonucleotides may also be present in the form of peptide nucleic acids. The non-hybridized amplificates are then removed. The hybridized amplificates are then detected. In this context, it is preferred that labels attached to the amplificates are identifiable at each position of the solid phase at which an oligonucleotide sequence is located.

[0348] In yet a further embodiment of the method, the genomic methylation status of the CpG positions may be ascertained by means of oligonucleotide probes that are hybridised to the bisulfite treated DNA concurrently with the PCR amplification primers (wherein said primers may either be methylation specific or standard).

[0349] A particularly preferred embodiment of this method is the use of fluorescence-based Real Time Quantitative PCR (Heid et al., Genome Res. 6:986-994, 1996; also see U.S. Pat. No. 6,331,393) employing a dual-labeled fluorescent oligonucleotide probe (TaqMan™ PCR, using an ABI Prism 7700 Sequence Detection System, Perkin Elmer Applied Biosystems, Foster City, Calif.). The TaqMan™ PCR reaction employs the use of a nonextendible interrogating oligonucleotide, called a TaqMan™ probe, which, in preferred embodiments, is designed to hybridize to a GpC-rich sequence located between the forward and reverse amplification primers. The TaqMan™ probe further comprises a fluorescent “reporter moiety” and a “quencher moiety” covalently bound to linker moieties (e.g., phosphoramidites) attached to the nucleotides of the TaqMan™ oligonucleotide. For analysis of methylation within nucleic acids subsequent to bisulfite treatment, it is required that the probe be methylation specific, as described in U.S. Pat. No. 6,331,393, (hereby incorporated by reference in its entirety) also known as the MethylLight™ assay. Variations on the TaqMan™ detection methodology that are also suitable for use with the described invention include the use of dual-probe technology (Lightcycler™) or fluorescent amplification primers (Sunrise™ technology). Both these techniques may be adapted in a manner suitable for use with bisulfite treated DNA, and moreover for methylation analysis within CpG dinucleotides.

[0350] A further suitable method for the use of probe oligonucleotides for the assessment of methylation by analysis of bisulfite treated nucleic acids. In a further preferred embodiment of the method, the fifth step of the method comprises the use of template-directed oligonucleotide extension, such as MS-SNuPE as described by Gonzalgo & Jones, Nucleic Acids Res. 25:2529-2531, 1997.

[0351] In yet a further embodiment of the method, the fourth step of the method comprises sequencing and subsequent sequence analysis of the amplificate generated in the third step of the method (Sanger F., et al., Proc Natl Acad Sci USA 74:5463-5467, 1977).

### BEST MODE

[0352] In the most preferred embodiment of the method the genomic nucleic acids are isolated and treated according to the first three steps of the method outlined above, namely:

[0353] a) obtaining, from a subject, a biological sample having subject genomic DNA;

[0354] b) extracting or otherwise isolating the genomic DNA;

[0355] c) treating the genomic DNA of b), or a fragment thereof, with one or more reagents to convert cytosine bases that are unmethylated in the 5-position thereof to uracil or to another base that is detectably dissimilar to cytosine in terms of hybridization properties; and wherein

[0356] d) amplifying subsequent to treatment in c) is carried out in a methylation specific manner, namely by use of methylation specific primers or blocking oligonucleotides, and further wherein

[0357] e) detecting of the amplificates is carried out by means of a real-time detection probe, as described above.

[0358] Preferably, where the subsequent amplification of d) is carried out by means of methylation specific primers, as described above, said methylation specific primers comprise a sequence having a length of at least 9 nucleotides which hybridizes to a treated nucleic acid sequence according to one of SEQ ID NO:65 to SEQ ID NO:320 and SEQ ID NO: 962 to SEQ ID NO: 965 and sequences complementary thereto, wherein the base sequence of said oligomers comprises at least one CpG dinucleotide. More preferably, where the subsequent amplification of d) is carried out by means of methylation specific primers, as described above, said methylation specific primers comprise a sequence having a length of at least 9 nucleotides which hybridizes to a treated nucleic acid sequence according to one of SEQ ID Nos: 133, 134, 261, 262, 189, 190, 317, 318, 101, 102, 229, 230 and most preferably SEQ ID Nos: 962-965 and sequences complementary thereto, wherein the base sequence of said oligomers comprises at least one CpG dinucleotide.

[0359] In an alternative most preferred embodiment of the method, the subsequent amplification of d) is carried out in the presence of blocking oligonucleotides, as described above. Said blocking oligonucleotides comprising a sequence having a length of at least 9 nucleotides which hybridizes to a treated nucleic acid sequence according to one of SEQ ID NO:65 to SEQ ID NO: 320 and SEQ ID NO: 961 to 965 and sequences complementary thereto, wherein the base sequence of said oligomers comprises at least one CpG, TpG or CpA dinucleotide. Preferably said blocking oligonucleotides comprising a sequence having a length of at least 9 nucleotides which hybridizes to a treated nucleic acid sequence according to one of SEQ ID Nos: 133, 134, 261, 262, 189, 190, 317, 318, 101, 102, 229, 230 and most preferably SEQ ID Nos: 962-965 and sequences complementary thereto, wherein the base sequence of said oligomers comprises at least one CpG, TpG or CpA dinucleotide.

[0360] Step e) of the method, namely the detection of the specific amplificates indicative of the methylation status of one or more CpG positions according to SEQ ID NO:1 to SEQ ID NO:64 and SEQ ID NO: 961 (preferably SEQ ID Nos: 35, 63, 19 and most preferably SEQ ID NO: 961) is carried out by means of real-time detection methods as described above.

[0361] Additional embodiments of the invention provide a method for the analysis of the methylation status of genomic DNA according to the invention SEQ ID NO:1 to SEQ ID NO:64 and SEQ ID NO: 961, (preferably SEQ ID Nos: 35, 63, 19 and most preferably SEQ ID NO: 961) and complements thereof without the need for pretreatment.

[0362] In the first step of such additional embodiments, the genomic DNA sample is isolated from tissue or cellular sources. Preferably, such sources include cell lines, histological slides, body fluids, or tissue embedded in paraffin. In the second step, the genomic DNA is extracted. Extraction may be by means that are standard to one skilled in the art, including but not limited to the use of detergent lysates, sonification and vortexing with glass beads. Once the nucleic acids have been extracted, the genomic double-stranded DNA is used in the analysis.

[0363] In a preferred embodiment, the DNA may be cleaved prior to the treatment, and this may be by any means standard in the state of the art, in particular with methylation-sensitive restriction endonucleases.

[0364] In the third step, the DNA is then digested with one or more methylation sensitive restriction enzymes. The digestion is carried out such that hydrolysis of the DNA at the restriction site is informative of the methylation status of a specific CpG dinucleotide.

[0365] In the fourth step, which is optional but a preferred embodiment, the restriction fragments are amplified. This is preferably carried out using a polymerase chain reaction, and said amplificates may carry suitable detectable labels as discussed above, namely fluorophore labels, radionuclides and mass labels.

[0366] In the fifth step the amplificates are detected. The detection may be by any means standard in the art, for example, but not limited to, gel electrophoresis analysis, hybridization analysis, incorporation of detectable tags within the PCR products, DNA array analysis, MALDI or ESI analysis.

[0367] Subsequent to the determination of the methylation state of the genomic nucleic acids the prognosis of the prostate cancer is deduced based upon the methylation state of at least one CpG dinucleotide sequence of SEQ ID NO:1 to SEQ ID NO:64 and SEQ ID NO: 961, or an average, or a value reflecting an average methylation state of a plurality of CpG dinucleotide sequences of SEQ ID NO:1 to SEQ ID NO:64 and SEQ ID NO: 961. Preferably said prognosis is based upon the methylation state of at least one CpG dinucleotide sequence of the genes PITX2, SEQ ID NO: 63, GPR7 and SEQ ID NO: 35 SEQ ID Nos. 35, 63, 19 and most preferably SEQ ID NO: 961), or an average, or a value reflecting an average methylation state of a plurality of CpG dinucleotide sequences of SEQ ID Nos: 35, 63, 19 and most preferably SEQ ID NO: 961. Hypomethylation of said CpG positions are associated with good prognosis, and hypermethylation is associated with poor prognosis. Hypermethylation is in general associated with under expression of mRNA and accordingly polypeptides. The cut-off point for determining hypo and hyper methylation is may be the median methylation level for a given population, or is preferably an optimized cut-off level. For the analysis of SEQ ID NO: 35 it is preferred that the cut-off is between 30% and 40% methylation, and most preferably 36.42%. For the analysis of SEQ ID NO: 63 it is preferred that the cut-off is between 2% and 10% methylation, and most preferably 5.96%. For the analysis of GPR7 it is preferred that the cut-off is between 20% and 10% methylation, and most preferably 16.65%. For the analysis of PITX2 it is preferred that the cut-off is between 20% and 10% methylation, and most preferably 14.27%.

[0368] Wherein the methods according to the present invention of expression analysis (most preferably by means of methylation analysis), of the herein described markers (preferably PITX2, SEQ ID NO: 63, GPR7 and SEQ ID NO: 35) are used to determine the prognosis of a prostate cancer said methods are preferably used in combination with other clinical prognostic variables used to determine prognosis most preferably Gleason score but also including nomogram score and PSA level (i.e. that said variables are factored in or taken into account). In a preferred embodiment of the invention prognostic expression analysis of each of the markers PITX2 and SEQ ID NO: 35 as herein described is carried out on patients who present with organ confined (T2) prostate cancer. PITX2 and SEQ ID NO: 35 have a distinct advantage in determining the prognosis of T2 prostate cancer, whereas it is current clinical practise that all patients presenting with T2 prostate cancer are deemed to have a good prognosis. According to the present invention said T2 patients with poor prognosis (hypermethylation) would have a prognosis more typical of patients presenting with T3 (non organ-confined) prostate cancer and may be treated appropriately. Furthermore prognostic expression analysis of each of the markers PITX2 and SEQ ID NO: 63 have further utility in the analysis of patients presenting high Gleason score (8 or higher). Said patients are currently considered to have a poor prognosis, however by means of the herein described method of PITX2 and SEQ ID NO: 63 expression analysis it is for the first time possible to differentiate high Gleason score patients with a poor prognosis (hypermethylation) from those with a good prognosis. Currently all patients with high Gleason score are considered candidates for post-surgical adjuvant treatment, accordingly the method according to the invention enables the prevention of over-treatment of said patients. Furthermore prognostic expression analysis of the marker SEQ ID NO: 63 has further utility in the analysis of patients presenting with poor prognosis based on nomogram score.

### Kits

[0369] Moreover, an additional aspect of the present invention is a kit comprising, for example: a bisulfite-containing reagent; a set of primer oligonucleotides containing at least two oligonucleotides whose sequences in each case correspond, are complementary, or hybridize under stringent or highly stringent conditions to a 16-base long segment of the sequences SEQ ID NO: 1 to SEQ ID NO: 320 and SEQ ID NO: 961 to 965; oligonucleotides and/or PNA-oligomers; as well as instructions for carrying out and evaluating the described method. In a further preferred embodiment, said kit may further comprise standard reagents for performing a CpG position-specific methylation analysis, wherein said analysis comprises one or more of the following techniques: MS-SNuPE, MSP, MethyLight™, HeavyMethyl™, COBRA, and nucleic acid sequencing. However, a kit along the lines of the present invention can also contain only part of the aforementioned components.

[0370] Preferably said kit comprises a bisulfite-containing reagent; a set of primer oligonucleotides containing at least two oligonucleotides whose sequences in each case correspond, are complementary, or hybridize under stringent or highly stringent conditions to a 16-base long segment of the sequences SEQ ID Nos: 133, 134, 261, 262, 189, 190, 317, 318, 101, 102, 229, 230 and most preferably SEQ ID Nos: 962-965; oligonucleotides and/or PNA-oligomers; as well as instructions for carrying out and evaluating the described method. In a further preferred embodiment, said kit may further comprise standard reagents for performing a CpG position-specific methylation analysis, wherein said analysis comprises one or more of the following techniques: MS-SNuPE, MSP, MethyLight™, HeavyMethyl™, COBRA, and nucleic acid sequencing. However, a kit along the lines of the present invention can also contain only part of the aforementioned components.

[0371] The described invention further provides a composition of matter useful for providing a prognosis of prostate cancer patients. Said composition comprising at least one nucleic acid 18 base pairs in length of a segment of a nucleic acid sequence selected from the group consisting SEQ ID Nos: 133, 134, 261, 262, 189, 190, 317, 318, 101, 102, 229, 230, 962-965, and one or more substances taken from the group comprising: magnesium chloride, dNTP, taq polymerase, bovine serum albumen, an oligomer in particular an oligonucleotide or peptide nucleic acid (PNA)-oligomer, said oligomer comprising in each case at least one base sequence having a length of at least 9 nucleotides which is complementary to, or hybridizes under moderately stringent or stringent conditions to a pretreated genomic DNA according to one of the SEQ ID Nos: 133, 134, 261, 262, 189, 190, 317, 318, 101, 102, 229, 230, 962-965 and sequences complementary thereto. It is preferred that said composition of matter comprises a buffer solution appropriate for the stabilization of said nucleic acid in an aqueous solution and enabling polymerase based reactions within said solution. Suitable buffers are known in the art and commercially available.

[0372] In one embodiment the invention provides a method for providing a diagnosis of prostate carcinoma or neoplasm in a subject. Said method comprises the following steps:

[0373] i) determining the expression levels of one or more genes or gene sequences of or according to CDRN2A, ELK1, GSTP1, RARB, PTGS2, RASSF1, ESR2, ONECUT2, BTG4, SLC35F2, HOXB5, LIMK1, HIST1H4J, SEQ ID NO: 35, EPAS1, NOTCH1, SEQ ID NO: 55, PTPRN2, Q9NP73, MX1, DOCK10, CCND2, ISL1, SNAPC2, GRN, H2AFY2, WDFY3, FOS, FAT, Q86SP6, SLC38A1, SNRPN, GPRK5, FBN2, ARHGEF18, RHOC, KBTBD6, NR2E1, PSD, DRG1, Q8N365, SEQ ID NO: 44, Q96S01, CD37, CMYA3, SEQ ID NO: 61, Q8NCX8 and ZNF566 and/or regulatory regions thereof; and

[0374] ii) determining the presence or absence of said prostate carcinoma or neoplasm according to said level of expression.

[0375] Said expression level may be determined by any means standard in the art including but not limited to methylation analysis, loss of heterozygosity (hereinafter also referred to as LOH), RNA expression levels and protein expression levels.

[0376] According said method may be enabled by means of any analysis of expression of a RNA transcribed therefrom or polypeptide or protein translated from said RNA, preferably by means of mRNA expression analysis or polypeptide expression analysis.

[0377] Accordingly the prognostic assays and methods, both quantitative and qualitative for detecting the expression of the genes, genomic sequences and/or regulatory regions according to Table 11 as applied to CDRN2A, ELK1, GSTP1, RARB, PTGS2, RASSF1, ESR2, ONECUT2, BTG4, SLC35F2, HOXB5, LIMK1, HIST1H4J, SEQ ID NO: 35, EPAS1, NOTCH1, SEQ ID NO: 55, PTPRN2, Q9NP73, MX1, DOCK10, CCND2, ISL1, SNAPC2, GRN, H2AFY2, WDFY3, FOS, FAT, Q86SP6, SLC38A1, SNRPN, GPRK5, FBN2, ARHGEF18, RHOC, KBTBD6, NR2E1, PSD, DRG1, Q8N365, SEQ ID NO: 44, Q96S01, CD37, CMYA3, SEQ ID NO: 61, Q8NCX8 and ZNF566 are suitable for said diagnostic purposes. Furthermore the compositions of matter, kits and nucleic acids as described above for analysis of the genes and sequences according to Table 11 above are also of use in the analysis of CDRN2A, ELK1, GSTP1, RARB, PTGS2, RASSF1, ESR2, ONECUT2, BTG4, SLC35F2, HOXB5, LIMK1, HIST1H4J, SEQ ID NO: 35, EPAS1, NOTCH1, SEQ ID NO: 55, PTPRN2, Q9NP73, MX1, DOCK10, CCND2, ISL1, SNAPC2, GRN, H2AFY2, WDFY3, FOS, FAT, Q86SP6, SLC38A1, SNRPN, GPRK5, FBN2, ARHGEF18, RHOC, KBTBD6, NR2E1, PSD, DRG1, Q8N365, SEQ ID NO: 44, Q96S01, CD37, CMYA3, SEQ ID NO: 61, Q8NCX8 and ZNF566 and therefore are also applicable in the detection of prostate carcinoma or neoplasms.

[0378] While the present invention has been described with specificity in accordance with certain of its preferred embodiments, the following EXAMPLES and TABLES serve only to illustrate the invention and are not intended to limit the invention within the principles and scope of the broadest interpretations and equivalent configurations thereof.

### Tables 1-12

TABLE 1
Experimental setup of MeST screening with number of samples in pools.

| | Number of | | |
|---|---|---|---|
| Experiment | comparisons | Aggressive group | Nonaggressive group |
| PSA | 3 | 5 tumors from patients who | 5 tumors from patients without |
| recurrence | | had PSA recurrences <2 yr | PSA recurrence after at least 4 |
| vs. no | | after surgery | years follow up |
| recurrence | | | |
| Late stage | 1 | 5 stage III and IV tumors | 5 stage I and II tumors |
| vs. Early | | | |
| stage | | | |
| High Gleason | 1 | 5 grade 4 or 5 tumors | 5 grade 1, 2, or 3 tumors |
| vs. Low | | | |
| Gleason | | | |
| NAT (PSA | 1 | 4 normal samples from | 4 normal tissue samples adjacent |
| recurrence) | | tissue adjacent to | to tumors from patients without |
| vs. NAT (no | | tumors from patients who | PSA recurrence after at least 4 |
| recurrence) | | had PSA recurrences <2 yr | years follow up |
| | | after surgery | |
| Peripheral | 1 | 5 peripheral zone tumors | 5 transition zone tumors |
| zone vs. | | | |
| Transition | | | |
| zone | | | |

TABLE 2
Summarized results of MeST Screening experiments

| Experiment: | |
|---|---|
| Total number of MeSTs | 441 |
| scoring >0 | 278 |
| MeSTs from MCA | 242 |
| scoring >0 | 126 |
| MeSTs from AP-PCR | 199 |
| scoring >0 | 152 |

TABLE 3
Total number of MeSTs and number of positive
MeSTs from each screening comparison.

| | Number of | Number of | Percent |
|---|---|---|---|
| Experiment | MeSTs | Positive MeSTs | Positive MeSTs |
| PSA recurrence vs. | 41 | 28 | 68% |
| no recurrence I | | | |
| PSA recurrence vs. | 113 | 74 | 65% |
| no recurrence II | | | |
| PSA recurrence vs. | 69 | 43 | 62% |
| no recurrence II | | | |
| Late stage vs. | 64 | 39 | 61% |
| Early stage | | | |
| High Gleason vs. | 63 | 48 | 76% |
| Low Gleason | | | |
| NAT (PSA | 103 | 66 | 64% |
| recurrence) vs. | | | |
| NAT (no | | | |
| recurrence) | | | |
| Peripheral Zone vs. | 76 | 48 | 63% |
| Transition Zone | | | |

TABLE 4
Summary of Real-time PCR data for seven candidates.

| | | | Sensi- | Speci- | P value |
|---|---|---|---|---|---|
| Candidate | Gene Name | AUC | tivity | ficity | (Wilcoxon) |
| SEQ ID NO: 19 | GPR7 | 0.76 | 0.50 | 0.87 | 0.0008 |
| SEQ ID NO: 35 | Genomic | 0.75 | 0.54 | 0.87 | 0.0016 |
| | region | | | | |
| | downstream | | | | |
| | of FOXL2 | | | | |
| SEQ ID NO: 37 | ABHD9 | 0.7 | 0.38 | 0.86 | 0.0115 |
| SEQ ID NO: 7 | GSTP1 | 0.69 | 0.38 | 0.87 | 0.0176 |
| SEQ ID NO: 63 | HIST2H2BF | 0.68 | 0.35 | 0.87 | 0.0241 |
| | regulatory | | | | |
| | region | | | | |
| SEQ ID NO: 8 | RARB | 0.68 | 0.50 | 0.85 | 0.0214 |
| SEQ ID NO: 64 | PMF1 | 0.47 | 0.15 | 0.87 | 0.7138 |

P values are from a Wilcoxon test and are uncorrected for multiple comparisons. The sensitivity is calculated when the specificity is set at 0.85 or greater.

TABLE 5
A summary of the samples used in the chip study.

| | Sample | |
|---|---|---|
| Gleason Categories | Number | Outcome categories |
| A) Low Gleason | 135 | 1. No recurrence (n = 42) |
| (1 + 2, 2 + 1, 2 + 2, 2 + 3, | | 2. Early recurrence (n = 6) |
| 3 + 2, and 3 + 3) | | 3. Other (n = 87) |
| B) Intermediate Gleason | 73 | 1. No recurrence (n = 34) |
| (2 + 4, 4 + 2, 3 + 4, 4 + 3, | | 2. Early recurrence (n = 33) |
| 2 + 5, 5 + 2) | | 3. Other (n = 6) |
| C) High Gleason | 99 | 1. No recurrence (n = 9) |
| (3 + 5, 5 + 3, 4 + 4, 4 + 5, | | 2. Early recurrence (n = 26) |
| 5 + 4, and 5 + 5) | | 3. Other (n = 64) |
| D) No Gleason information | 4 | 1. No recurrence (n = 3) |
| | | 2. Early recurrence (n = 0) |
| | | 3. Other (n = 1) |

For the outcome categories, “No recurrence” means the patient did not have a relapse and at least 48 months follow up information was available. “Early recurrence” indicates that the patient experienced PSA relapse in less than 2 years after surgery. “Other” includes patients with no follow up information and patients who did not fit the criteria for the recurrence categories.

TABLE 6

Corrected Wilcoxon p-value/AUC/Sensitivity/
Specificity of the amplificates. Sensitivity
is reported at a fixed specificity of −0.75.

| | | | | |
|---|---|---|---|---|
| Marker | p-value | AUC | Sensitivity | Specificity |

| | | | | |
|---|---|---|---|---|
| SEQ ID NO: 19 | 2.05E-06 | 0.72 | 0.58 | 0.75 |
| SEQ ID NO: 41 | 2.17E-06 | 0.71 | 0.51 | 0.75 |
| SEQ ID NO: 37 | 4.15E-06 | 0.71 | 0.55 | 0.75 |
| SEQ ID NO: 51 | 8.65E-06 | 0.71 | 0.51 | 0.75 |
| SEQ ID NO: 35 | 2.60E-05 | 0.70 | 0.48 | 0.75 |
| SEQ ID NO: 4 | 5.52E-05 | 0.69 | 0.51 | 0.75 |
| SEQ ID NO: 17 | 5.89E-05 | 0.69 | 0.51 | 0.75 |
| SEQ ID NO: 16 | 6.82E-05 | 0.69 | 0.47 | 0.75 |
| SEQ ID NO: 9 | 9.30E-05 | 0.69 | 0.57 | 0.75 |
| SEQ ID NO: 47 | 1.80E-04 | 0.68 | 0.46 | 0.75 |
| SEQ ID NO: 49 | 2.05E-04 | 0.68 | 0.49 | 0.75 |
| SEQ ID NO: 42 | 3.84E-04 | 0.68 | 0.45 | 0.75 |
| SEQ ID NO: 57 | 4.34E-04 | 0.68 | 0.49 | 0.75 |
| SEQ ID NO: 1 | 7.44E-04 | 0.67 | 0.51 | 0.75 |
| SEQ ID NO: 7 | 8.06E-04 | 0.67 | 0.43 | 0.75 |
| SEQ ID NO: 62 | 8.06E-04 | 0.67 | 0.49 | 0.75 |
| SEQ ID NO: 8 | 9.30E-04 | 0.67 | 0.47 | 0.75 |
| SEQ ID NO: 58 | 1.24E-03 | 0.67 | 0.46 | 0.75 |
| SEQ ID NO: 3 | 2.79E-03 | 0.66 | 0.48 | 0.75 |
| SEQ ID NO: 13 | 3.84E-03 | 0.66 | 0.45 | 0.75 |
| SEQ ID NO: 23 | 8.68E-03 | 0.65 | 0.43 | 0.75 |
| SEQ ID NO: 29 | 9.30E-03 | 0.65 | 0.41 | 0.75 |
| SEQ ID NO: 39 | 9.30E-03 | 0.65 | 0.41 | 0.75 |
| SEQ ID NO: 5 | 1.05E-02 | 0.65 | 0.47 | 0.75 |
| SEQ ID NO: 56 | 0.03 | 0.64 | 0.46 | 0.75 |
| SEQ ID NO: 10 | 0.10 | 0.62 | 0.41 | 0.75 |
| SEQ ID NO: 2 | 0.11 | 0.62 | 0.40 | 0.75 |
| SEQ ID NO: 6 | 0.13 | 0.62 | 0.40 | 0.75 |
| SEQ ID NO: 50 | 0.25 | 0.61 | 0.42 | 0.75 |
| SEQ ID NO: 33 | 0.36 | 0.61 | 0.47 | 0.75 |
| SEQ ID NO: 15 | 0.37 | 0.61 | 0.35 | 0.75 |
| SEQ ID NO: 60 | 0.39 | 0.61 | 0.43 | 0.75 |
| SEQ ID NO: 55 | 0.46 | 0.60 | 0.31 | 0.75 |
| SEQ ID NO: 52 | 0.47 | 0.60 | 0.38 | 0.75 |
| SEQ ID NO: 20 | 0.87 | 0.60 | 0.33 | 0.75 |
| SEQ ID NO: 21 | 0.87 | 0.60 | 0.42 | 0.75 |
| SEQ ID NO: 24 | 1.00 | 0.59 | 0.35 | 0.75 |
| SEQ ID NO: 54 | 1.00 | 0.59 | 0.36 | 0.75 |
| SEQ ID NO: 30 | 1.00 | 0.59 | 0.36 | 0.75 |
| SEQ ID NO: 43 | 1.00 | 0.42 | 0.22 | 0.75 |
| SEQ ID NO: 48 | 1.00 | 0.58 | 0.35 | 0.75 |
| SEQ ID NO: 45 | 1.00 | 0.58 | 0.32 | 0.75 |
| SEQ ID NO: 26 | 1.00 | 0.58 | 0.38 | 0.75 |
| SEQ ID NO: 31 | 1.00 | 0.57 | 0.42 | 0.75 |
| SEQ ID NO: 38 | 1.00 | 0.56 | 0.34 | 0.75 |
| SEQ ID NO: 28 | 1.00 | 0.56 | 0.36 | 0.75 |
| SEQ ID NO: 32 | 1.00 | 0.56 | 0.33 | 0.75 |
| SEQ ID NO: 40 | 1.00 | 0.56 | 0.30 | 0.75 |
| SEQ ID NO: 27 | 1.00 | 0.55 | 0.34 | 0.75 |
| SEQ ID NO: 61 | 1.00 | 0.45 | 0.21 | 0.75 |
| SEQ ID NO: 11 | 1.00 | 0.54 | 0.34 | 0.75 |
| SEQ ID NO: 44 | 1.00 | 0.54 | 0.28 | 0.75 |
| SEQ ID NO: 53 | 1.00 | 0.54 | 0.21 | 0.75 |
| SEQ ID NO: 22 | 1.00 | 0.54 | 0.28 | 0.75 |
| SEQ ID NO: 18 | 1.00 | 0.47 | 0.20 | 0.75 |
| SEQ ID NO: 59 | 1.00 | 0.47 | 0.25 | 0.75 |
| SEQ ID NO: 36 | 1.00 | 0.47 | 0.22 | 0.75 |
| SEQ ID NO: 12 | 1.00 | 0.53 | 0.24 | 0.75 |
| SEQ ID NO: 34 | 1.00 | 0.52 | 0.27 | 0.75 |
| SEQ ID NO: 46 | 1.00 | 0.48 | 0.19 | 0.75 |
| SEQ ID NO: 25 | 1.00 | 0.51 | 0.25 | 0.75 |
| SEQ ID NO: 14 | 1.00 | 0.51 | 0.24 | 0.75 |

TABLE 7

Corrected Wilcoxon p-value/AUC/Sensitivity/
Specificity of the amplificates. Sensitivity
is reported at a fixed specificity of −0.75.

| | | | | |
|---|---|---|---|---|
| Marker | p-value | AUC | Sensitivity | Specificity |

| | | | | |
|---|---|---|---|---|
| SEQ ID NO: 19 | 2.42E-04 | 0.72 | 0.59 | 0.76 |
| SEQ ID NO: 35 | 2.48E-04 | 0.72 | 0.59 | 0.76 |
| SEQ ID NO: 37 | 0.05 | 0.66 | 0.37 | 0.76 |
| SEQ ID NO: 20 | 0.07 | 0.66 | 0.44 | 0.76 |
| SEQ ID NO: 13 | 0.08 | 0.65 | 0.46 | 0.76 |
| SEQ ID NO: 9 | 0.11 | 0.65 | 0.37 | 0.76 |
| SEQ ID NO: 41 | 0.11 | 0.65 | 0.37 | 0.76 |
| SEQ ID NO: 57 | 0.11 | 0.65 | 0.41 | 0.76 |
| SEQ ID NO: 51 | 0.12 | 0.65 | 0.49 | 0.76 |
| SEQ ID NO: 4 | 0.22 | 0.64 | 0.40 | 0.76 |
| SEQ ID NO: 1 | 0.24 | 0.64 | 0.41 | 0.76 |
| SEQ ID NO: 10 | 0.57 | 0.62 | 0.38 | 0.76 |
| SEQ ID NO: 15 | 0.61 | 0.62 | 0.36 | 0.76 |
| SEQ ID NO: 17 | 0.74 | 0.62 | 0.32 | 0.76 |
| SEQ ID NO: 58 | 0.93 | 0.62 | 0.40 | 0.76 |
| SEQ ID NO: 62 | 1.00 | 0.61 | 0.49 | 0.76 |
| SEQ ID NO: 43 | 1.00 | 0.39 | 0.11 | 0.76 |
| SEQ ID NO: 29 | 1.00 | 0.61 | 0.37 | 0.76 |
| SEQ ID NO: 16 | 1.00 | 0.60 | 0.35 | 0.76 |
| SEQ ID NO: 23 | 1.00 | 0.60 | 0.40 | 0.76 |
| SEQ ID NO: 5 | 1.00 | 0.60 | 0.44 | 0.76 |
| SEQ ID NO: 42 | 1.00 | 0.60 | 0.32 | 0.76 |
| SEQ ID NO: 49 | 1.00 | 0.59 | 0.37 | 0.76 |
| SEQ ID NO: 3 | 1.00 | 0.59 | 0.40 | 0.76 |
| SEQ ID NO: 47 | 1.00 | 0.59 | 0.35 | 0.76 |
| SEQ ID NO: 7 | 1.00 | 0.59 | 0.27 | 0.76 |
| SEQ ID NO: 28 | 1.00 | 0.59 | 0.37 | 0.76 |
| SEQ ID NO: 2 | 1.00 | 0.59 | 0.29 | 0.76 |
| SEQ ID NO: 18 | 1.00 | 0.42 | 0.14 | 0.76 |
| SEQ ID NO: 45 | 1.00 | 0.58 | 0.38 | 0.76 |
| SEQ ID NO: 8 | 1.00 | 0.58 | 0.25 | 0.76 |
| SEQ ID NO: 46 | 1.00 | 0.42 | 0.13 | 0.76 |
| SEQ ID NO: 30 | 1.00 | 0.58 | 0.32 | 0.76 |
| SEQ ID NO: 39 | 1.00 | 0.58 | 0.35 | 0.76 |
| SEQ ID NO: 54 | 1.00 | 0.57 | 0.32 | 0.76 |
| SEQ ID NO: 25 | 1.00 | 0.43 | 0.17 | 0.76 |
| SEQ ID NO: 6 | 1.00 | 0.57 | 0.30 | 0.76 |
| SEQ ID NO: 11 | 1.00 | 0.57 | 0.41 | 0.76 |
| SEQ ID NO: 36 | 1.00 | 0.57 | 0.33 | 0.76 |
| SEQ ID NO: 60 | 1.00 | 0.57 | 0.32 | 0.76 |
| SEQ ID NO: 61 | 1.00 | 0.43 | 0.13 | 0.76 |
| SEQ ID NO: 55 | 1.00 | 0.56 | 0.27 | 0.76 |
| SEQ ID NO. 33 | 1.00 | 0.56 | 0.27 | 0.76 |
| SEQ ID NO: 21 | 1.00 | 0.56 | 0.21 | 0.76 |
| SEQ ID NO: 56 | 1.00 | 0.56 | 0.32 | 0.76 |
| SEQ ID NO: 24 | 1.00 | 0.56 | 0.27 | 0.76 |
| SEQ ID NO: 38 | 1.00 | 0.55 | 0.37 | 0.76 |
| SEQ ID NO: 48 | 1.00 | 0.55 | 0.33 | 0.76 |
| SEQ ID NO: 26 | 1.00 | 0.45 | 0.22 | 0.76 |
| SEQ ID NO: 59 | 1.00 | 0.54 | 0.38 | 0.76 |
| SEQ ID NO: 34 | 1.00 | 0.47 | 0.22 | 0.76 |
| SEQ ID NO: 52 | 1.00 | 0.53 | 0.22 | 0.76 |
| SEQ ID NO: 50 | 1.00 | 0.53 | 0.27 | 0.76 |
| SEQ ID NO: 14 | 1.00 | 0.47 | 0.21 | 0.76 |
| SEQ ID NO: 22 | 1.00 | 0.47 | 0.27 | 0.76 |
| SEQ ID NO: 32 | 1.00 | 0.52 | 0.29 | 0.76 |
| SEQ ID NO: 53 | 1.00 | 0.52 | 0.25 | 0.76 |
| SEQ ID NO: 44 | 1.00 | 0.48 | 0.27 | 0.76 |
| SEQ ID NO: 40 | 1.00 | 0.49 | 0.13 | 0.76 |
| SEQ ID NO: 27 | 1.00 | 0.50 | 0.33 | 0.76 |
| SEQ ID NO: 12 | 1.00 | 0.50 | 0.21 | 0.76 |
| SEQ ID NO: 31 | 1.00 | 0.50 | 0.16 | 0.76 |

TABLE 8

Corrected Wilcoxon p-value/AUC/Sensitivity/
Specificity of the amplificates. Sensitivity
is reported at a fixed specificity of −0.75.

| | | | | |
|---|---|---|---|---|
| Marker | p-value | AUC | Sensitivity | Specificity |

| | | | | |
|---|---|---|---|---|
| SEQ ID NO: 19 | 2.42E-04 | 0.72 | 0.59 | 0.76 |
| SEQ ID NO: 35 | 2.48E-04 | 0.72 | 0.59 | 0.76 |
| SEQ ID NO: 37 | 0.05 | 0.66 | 0.37 | 0.76 |
| SEQ ID NO: 20 | 0.07 | 0.66 | 0.44 | 0.76 |
| SEQ ID NO: 13 | 0.08 | 0.65 | 0.46 | 0.76 |
| SEQ ID NO: 9 | 0.11 | 0.65 | 0.37 | 0.76 |
| SEQ ID NO: 41 | 0.11 | 0.65 | 0.37 | 0.76 |
| SEQ ID NO: 57 | 0.11 | 0.65 | 0.41 | 0.76 |
| SEQ ID NO: 51 | 0.12 | 0.65 | 0.49 | 0.76 |
| SEQ ID NO: 4 | 0.22 | 0.64 | 0.40 | 0.76 |
| SEQ ID NO: 1 | 0.24 | 0.64 | 0.41 | 0.76 |
| SEQ ID NO: 10 | 0.57 | 0.62 | 0.38 | 0.76 |
| SEQ ID NO: 15 | 0.61 | 0.62 | 0.38 | 0.76 |
| SEQ ID NO: 17 | 0.74 | 0.62 | 0.32 | 0.76 |
| SEQ ID NO: 58 | 0.93 | 0.62 | 0.40 | 0.76 |
| SEQ ID NO: 62 | 1.00 | 0.61 | 0.49 | 0.76 |
| SEQ ID NO: 43 | 1.00 | 0.39 | 0.11 | 0.76 |
| SEQ ID NO: 29 | 1.00 | 0.61 | 0.37 | 0.76 |
| SEQ ID NO: 16 | 1.00 | 0.60 | 0.35 | 0.76 |
| SEQ ID NO: 23 | 1.00 | 0.60 | 0.40 | 0.76 |
| SEQ ID NO: 5 | 1.00 | 0.60 | 0.44 | 0.76 |
| SEQ ID NO: 42 | 1.00 | 0.60 | 0.32 | 0.76 |
| SEQ ID NO: 49 | 1.00 | 0.59 | 0.37 | 0.76 |
| SEQ ID NO: 3 | 1.00 | 0.59 | 0.40 | 0.76 |
| SEQ ID NO: 47 | 1.00 | 0.59 | 0.35 | 0.76 |
| SEQ ID NO: 7 | 1.00 | 0.59 | 0.27 | 0.76 |
| SEQ ID NO: 28 | 1.00 | 0.59 | 0.37 | 0.76 |
| SEQ ID NO: 2 | 1.00 | 0.59 | 0.29 | 0.76 |
| SEQ ID NO: 18 | 1.00 | 0.42 | 0.14 | 0.76 |
| SEQ ID NO: 45 | 1.00 | 0.58 | 0.38 | 0.76 |
| SEQ ID NO: 8 | 1.00 | 0.58 | 0.25 | 0.76 |
| SEQ ID NO: 46 | 1.00 | 0.42 | 0.13 | 0.76 |
| SEQ ID NO: 30 | 1.00 | 0.58 | 0.32 | 0.76 |
| SEQ ID NO: 39 | 1.00 | 0.58 | 0.35 | 0.76 |
| SEQ ID NO: 54 | 1.00 | 0.57 | 0.32 | 0.76 |
| SEQ ID NO: 25 | 1.00 | 0.43 | 0.17 | 0.76 |
| SEQ ID NO: 6 | 1.00 | 0.57 | 0.30 | 0.76 |
| SEQ ID NO: 11 | 1.00 | 0.57 | 0.41 | 0.76 |
| SEQ ID NO: 36 | 1.00 | 0.57 | 0.33 | 0.76 |
| SEQ ID NO: 60 | 1.00 | 0.57 | 0.32 | 0.76 |
| SEQ ID NO: 61 | 1.00 | 0.43 | 0.13 | 0.76 |
| SEQ ID NO: 55 | 1.00 | 0.56 | 0.27 | 0.76 |
| SEQ ID NO: 33 | 1.00 | 0.56 | 0.27 | 0.76 |
| SEQ ID NO: 21 | 1.00 | 0.56 | 0.21 | 0.76 |
| SEQ ID NO: 56 | 1.00 | 0.56 | 0.32 | 0.76 |
| SEQ ID NO: 24 | 1.00 | 0.56 | 0.27 | 0.76 |
| SEQ ID NO: 38 | 1.00 | 0.55 | 0.37 | 0.76 |
| SEQ ID NO: 48 | 1.00 | 0.55 | 0.33 | 0.76 |
| SEQ ID NO: 26 | 1.00 | 0.45 | 0.22 | 0.76 |
| SEQ ID NO: 59 | 1.00 | 0.54 | 0.38 | 0.76 |
| SEQ ID NO: 34 | 1.00 | 0.47 | 0.22 | 0.76 |
| SEQ ID NO: 52 | 1.00 | 0.53 | 0.22 | 0.76 |
| SEQ ID NO: 50 | 1,00 | 0.53 | 0.27 | 0.76 |
| SEQ ID NO: 14 | 1.00 | 0.47 | 0.21 | 0.76 |
| SEQ ID NO: 22 | 1.00 | 0.47 | 0.27 | 0.76 |
| SEQ ID NO: 32 | 1.00 | 0.52 | 0.29 | 0.76 |
| SEQ ID NO: 53 | 1.00 | 0.52 | 0.25 | 0.76 |
| SEQ ID NO: 44 | 1.00 | 0.48 | 0.27 | 0.76 |
| SEQ ID NO: 40 | 1.00 | 0.49 | 0.13 | 0.76 |
| SEQ ID NO: 27 | 1.00 | 0.50 | 0.33 | 0.76 |
| SEQ ID NO: 12 | 1.00 | 0.50 | 0.21 | 0.76 |
| SEQ ID NO: 31 | 1.00 | 0.50 | 0.16 | 0.76 |

TABLE 9
Primers according to EXAMPLE 3.

| | | Amplificate |
|---|---|---|
| Gene | Primers: | Length: |
| CCND2 | AAAAACAACCTTAACTC | 504 |
| (SEQ ID NO: 1) | AAACAT | |
| | (SEQ ID NO: 322) | |
| | TTTGGAGGGATAGAAT | |
| | GTGA | |
| | (SEQ ID NO: 321) | |
| CDKN2A | AGATTATTAG1TrTTA | |
| (SEQ ID NO: 2) | TGAGGGATT | |
| | (SEQ ID NO: 323) | |
| | CCACCCTAACTCTAACC | |
| | ATTC | |
| | (SEQ ID NO: 324) | |
| CD44 | TTTTTGTTTGGGTGTGT | 403 |
| (SEQ ID NO: 3) | TTT | |
| | (SEQ ID NO: 325) | |
| | CACTTAAGTCCAATCCC | |
| | CC | |
| | (SEQ ID NO: 326) | |
| EDNRB1 | CAAAAACTTCTCAAATC | 446 |
| (SEQ ID NO: 4) | AACAA | |
| | (SEQ ID NO: 328) | |
| | GAAGGGATGAATGAAT | |
| | AAAAGT | |
| | (SEQ ID NO: 327) | |
| ELK1 | TCCAATAAACACAAACC | |
| (SEQ ID NO: 5) | TAAATC | |
| | (SEQ ID NO: 330) | |
| | ATATGGGATTGATGGA | |
| | AGATAG | |
| | (SEQ ID NO: 329) | |
| FOS | TTTTTATTTAGGATGAG | |
| (SEQ ID NO: 6) | GGATATT | |
| | (SEQ ID NO: 331) | |
| | ACTACTTCCCACCCAAC | |
| | C | |
| | (SEQ ID NO: 332) | |
| GSTP1 | CTACTATCTATTTACTC | 347 |
| (SEQ ID NO: 7) | CCTAAAC | |
| | (SEQ ID NO: 334) | |
| | TTGGTTTTATGTTGGGA | |
| | GTTTTG | |
| | (SEQ ID NO: 333) | |
| RARB | GGGAGTTTTAAGTTTT | 488 |
| (SEQ ID NO: 8) | GTGAG | |
| | (SEQ ID NO: 335) | |
| | TTAATCTTTTTCCCAAC | |
| | CC | |
| | (SEQ ID NO: 336) | |
| PTGS2 | AACATATCAACCTTTCT | 344 |
| (SEQ ID NO: 9) | TAACCTT | |
| | (SEQ ID NO: 338) | |
| | AGAGGGGGTAGTTTTT | |
| | ATTTTT | |
| | (SEQ ID NO: 337) | |
| RASSF1 | AGTGGGTAGGTTAAGT | 319 |
| (SEQ ID NO: 10) | GTGTTG | |
| | (SEQ ID NO: 339) | |
| | CCCCAAAATCCAAACT | |
| | AA | |
| | (SEQ ID NO: 340) | |
| ESR2 | AGTTGGAGAAATTGAAA | 441 |
| (SEQ ID NO: 11) | AGATTA | |
| | (SEQ ID NO: 341) | |
| | TAAGAAACCCAAAACCT | |
| | CTGTA | |
| | (SEQ ID NO: 342) | |
| DRG1 | TTTAGTTGTGAAAAAGG | 436 |
| (SEQ ID NO: 12) | GATTT | |
| | (SEQ ID NO: 343) | |
| | CCCTATAACCTCCACAC | |
| | TATCTC | |
| | (SEQ ID NO: 344) | |
| DRG1 | CCCATCCCACAATTAAA | |
| (SEQ ID NO: 12) | A | |
| | (SEQ ID NO: 346) | |
| | GTTTTGGAGGGAGTAG | |
| | AGATT | |
| | (SEQ ID NO: 345) | |
| CMYA3 | ACTCCCCAAAATCCCA | 488 |
| (SEQ ID NO: 13) | CT | |
| | (SEQ ID NO: 348) | |
| | TGTTTTAGGTTTGATGG | |
| | ATTAGA | |
| | (SEQ ID NO: 347) | |
| ONECUT2 | GAAGAGGTGTTGAGAA | 462 |
| (SEQ ID NO: 14) | ATTAAAA | |
| | (SEQ ID NO: 349) | |
| | CCCACCCTAACTTACC | |
| | TAAA | |
| | (SEQ ID NO: 350) | |
| MX1 | TGTAGGAGAGGTTGGG | 341 |
| (SEQ ID NO: 15) | AAG | |
| | (SEQ ID NO: 351) | |
| | CCAAACATAACATCCAC | |
| | TAAAA | |
| | (SEQ ID NO: 352) | |
| DOCK10 | TACCTCTTCCCTCTACC | 459 |
| (SEQ ID NO: 16) | AAAC | |
| | (SEQ ID NO: 354) | |
| | GTTTTTAAGTGTTGGGT | |
| | GATTT | |
| | (SEQ ID NO: 353) | |
| BTG4 | AAGAGTTTTAGGAAATG | 199 |
| (SEQ ID NO: 17) | TGTTTTT | |
| | (SEQ ID NO: 355) | |
| | TTCTACTCACCAAACCC | |
| | TCTAC | |
| | (SEQ ID NO: 356) | |
| DMRTC2 | TAAGGTAAGGGkAGGT | 477 |
| (SEQ ID NO: 18) | TAGAAA | |
| | (SEQ ID NO: 357) | |
| | ATTACCACAACCTCCAA | |
| | TAAAA | |
| | (SEQ ID NO: 358) | |
| GPR7 | TTATTATTTTAGATGGA | 442 |
| (SEQ ID NO: 19) | GTGAGGTT | |
| | (SEQ ID NO: 359) | |
| | CCCAAATTACCCCAC | |
| | A | |
| | (SEQ ID NO: 360) | |
| FAT | TACTCACCCCAATCTTC | 444 |
| (SEQ ID NO: 20) | ACTA | |
| | (SEQ ID NO: 362) | |
| | AGATGTTTTATATTTGT | |
| | TTGGGA | |
| | (SEQ ID NO: 361) | |
| ISL1 | ATCTCCCAAAAACAATC | 412 |
| (SEQ ID NO: 21) | ACA | |
| | (SEQ ID NO: 364) | |
| | TAAAAATGGAAGGGAA | |
| | GATAGA | |
| | (SEQ ID NO: 363) | |
| GPRK5 | TTGTGGTTATTTTGAGA | 416 |
| (SEQ ID NO: 22) | TGGTA | |
| | (SEQ ID NO: 365) | |
| | CCCTCCCCCTAACT | |
| | A | |
| | (SEQ ID NO: 366) | |
| SLC35F2 | TTTATTTATTAGGTGAA | 366 |
| (SEQ ID NO: 23) | GAGTTTGTT | |
| | (SEQ ID NO: 367) | |
| | CCTCCTACCACCCT | |
| | AA | |
| | (SEQ ID NO: 368) | |
| C14orf59 | AAAACTCCTCCCCTCTA | 492 |
| (SEQ ID NO: 24) | TAAAT | |
| | (SEQ ID NO: 370) | |
| | TTGGAGAGATGTGTTG | |
| | GTTAG | |
| | (SEQ ID NO: 369) | |
| SNRPN | CCCCTCTCATTACAACA | 407 |
| (SEQ ID NO: 25) | ATACT | |
| | (SEQ ID NO: 372) | |
| | TTTTTAGAATAAAGGAT | |
| | TTTAGGG | |
| | (SEQ ID NO: 371) | |
| ARHGEF18 | TTTAGGAATGTAGGAT | 454 |
| (SEQ ID NO: 26) | ATAAGGG | |
| | (SEQ ID NO: 373) | |
| | CCCCACATAAAAACCTA | |
| | TCC | |
| | (SEQ ID NO: 374) | |
| SNX8 | TCCCTGGTAACTCAACA | 273 |
| (SEQ ID NO: 27) | CTAA | |
| | (SEQ ID NO: 376) | |
| | TAGGGTTTGATGATGT | |
| | GATTTT | |
| | (SEQ ID NO: 375) | |
| FBN2 | GAGAGGGAGGGTTAAG | 193 |
| (SEQ ID NO: 28) | GTT | |
| | (SEQ ID NO: 377) | |
| | ACTACTACCTCCTTTCC | |
| | CAAAT | |
| | (SEQ ID NO: 378) | |
| HOXB5 | CTCCTCAATTCTCACCA | 356 |
| (SEQ ID NO: 29) | AAA | |
| | (SEQ ID NO: 380) | |
| | GTGGAAAAAGGAGAGT | |
| | AAATTG | |
| | (SEQ ID NO: 379) | |
| LIMK1 | AAACCCTACTTCCTACA | |
| (SEQ ID NO: 30) | AACAA | |
| | (SEQ ID NO: 382) | |
| | AGGGAGGTTTGGTGTA | |
| | TTTT | |
| | (SEQ ID NO: 381) | |
| PSD/Q9H469 | AAGGTATTATTTTTGGG | 333 |
| (SEQ ID NO: 31) | GTTTT | |
| | (SEQ ID NO: 383) | |
| | AACTATCCAACCTCTTC | |
| | CACTT | |
| | (SEQ ID NO: 384) | |
| SLC38A1 | GGGTGTTGGGGAGTTT | 334 |
| (SEQ ID NO: 32) | TA | |
| | (SEQ ID NO: 385) | |
| | CTTACAATAACTCACTA | |
| | TCCTTTCC | |
| | (SEQ ID NO: 386) | |
| SLC38A1 | ACAAACATCCTTTAATA | 317 |
| (SEQ ID NO: 32) | ATTTCTCC | |
| | (SEQ ID NO: 388) | |
| | GAGTGTGGTATTAGA | |
| | TTGGTTTT | |
| | (SEQ ID NO: 387) | |
| HIST1H4J | TTAGTTGAGAAAGTGG | 421 |
| (SEQ ID NO: 33) | GGGT | |
| | (SEQ ID NO: 389) | |
| | CTACCTCAAACCAAAAT | |
| | CCTC | |
| | (SEQ ID NO: 390) | |
| Q96S01 | ACCCCAATCAACTACAT 498 | |
| (SEQ ID NO: 34) | AACTAA | |
| | (SEQ ID NO: 392) | |
| | GTGAGAGTGGGTGTTG | |
| | AAAT | |
| | (SEQ ID NO: 391) | |
| Genomic region | ATTTTAGGTGTAAGTTT | 473 |
| downstream of | AAGGTTGT | |
| FOXL2 | (SEQ ID NO: 393) | |
| (SEQ ID NO: 35) | ATCTACCTTTCCCCACC | |
| | C | |
| | (SEQ ID NO: 394) | |
| ORC4L | GTTGAGAGGTAAGGTA | 477 |
| (SEQ ID NO: 36) | TGAAGG | |
| | (SEQ ID NO: 395) | |
| | TTAATTCCCCTCTTTAA | |
| | CCTAATAA | |
| | (SEQ ID NO: 396) | |
| ABHD9 | GTGTTAGGGTTTAGGG | 209 |
| (SEQ ID NO: 37) | GTTT | |
| | (SEQ ID NO: 397) | |
| | CCTTTCCAACCTCTTCC | |
| | T | |
| | (SEQ ID NO: 398) | |
| CD37 | CTCATCAACCAACCC | 466 |
| (SEQ ID NO: 38) | A | |
| | (SEQ ID NO: 400) | |
| | TAGATGGGGATAGGAA | |
| | GTTGT | |
| | (SEQ ID NO: 399) | |
| GRN | CATTCCAAACTAACCCC | 466 |
| (SEQ ID NO: 39) | A | |
| | (SEQ ID NO: 402) | |
| | TTATTAGGAGAGGGGA | |
| | AGAAGT | |
| | (SEQ ID NO: 401) | |
| EPAS1 | TATTGGATGTTTTTGGT | 479 |
| (SEQ ID NO: 40) | AGGTT | |
| | (SEQ ID NO: 403) | |
| | AATCACCTCCCTCCC | |
| | A | |
| | (SEQ ID NO: 404) | |
| NOTCH1 | CCACCCTAAAAACTC | 424 |
| (SEQ ID NO. 41) | CTA | |
| | (SEQ ID NO: 406) | |
| | GGAGGGGTTTGAGTAA | |
| | TTG | |
| | (SEQ ID NO: 405) | |
| MLLT3 | GATTAGGTTTGGAGTT | |
| (SEQ ID NO: 42) | GTTTTT | |
| | (SEQ ID NO: 407) | |
| | AATCACATCCATCTTTC | |
| | ACTTT | |
| | (SEQ ID NO: 408) | |
| SOLH | CCCAACTCCCCAAATAA | 389 |
| (SEQ ID NO: 43) | A | |
| | (SEQ ID NO: 410) | |
| | GGGGATAAGTGGTTAA | |
| | TGAGT | |
| | (SEQ ID NO: 409) | |
| SEQ ID NO:44 | ATAGTGTGGATTTTTAG | 448 |
| (SEQ ID NO: 44) | GGATATT | |
| | (SEQ ID NO: 411) | |
| | CAAAACCTATTCCCCTA | |
| | CCT | |
| | (SEQ ID NO: 412) | |
| Q8N365 | GTAGTAAATGGGTTATG | 475 |
| (SEQ ID NO: 45) | GATTTTAG | |
| | (SEQ ID NO: 413) | |
| | CCATACCACCCACAAA | |
| | CA | |
| | (SEQ ID NO: 414) | |
| Q9NWV0 | TTTTAGTAGTGGATTTG | 330 |
| (SEQ ID NO: 46) | GTTAGTATT | |
| | (SEQ ID NO: 415) | |
| | CATCTCTTAACCCCACT | |
| | TTCA | |
| | (SEQ ID NO: 416) | |
| SEQ ID NO: 47 | TCCCTCTAAAAACCAAA | 335 |
| (SEQ ID NO: 47) | AATC | |
| | (SEQ ID NO. 418) | |
| | GAGGAAAGAAGGAGGA | |
| | TATAGG | |
| | (SEQ ID NO: 417) | |
| H2AFY2 | GTTAAAGGGGTATTGG | 490 |
| (SEQ ID NO: 48) | TTTT | |
| | (SEQ ID NO: 419) | |
| | TTTCTTTTTCTCTCACC | |
| | TATTAAAC | |
| | (SEQ ID NO: 420) | |
| RHOC | GTAAGAGGGATAGGGA | 440 |
| (SEQ ID NO: 49) | ATTGG | |
| | (SEQ ID NO: 421) | |
| | CACCCAAACCAAAA | |
| | AAAA | |
| | (SEQ ID NO: 422) | |
| NR2E1 | GGAGTTTGTGAAAAGT | 429 |
| (SEQ ID NO: 50) | GGG | |
| | (SEQ ID NO: 423) | |
| | ACTCAAACAAATACAATA | |
| | ATCTAAACC | |
| | (SEQ ID NO: 424) | |
| KBTBD6 | ACTATACCAACAAAACT | 228 |
| (SEQ ID NO: 51) | ACAAAATAAA | |
| | (SEQ ID NO: 426) | |
| | GAAGGTTGAGGAGGAG | |
| | TTAGA | |
| | (SEQ ID NO: 425) | |
| TRPM4 | GGTTGGAAAGTGGAGG | 438 |
| (SEQ ID NO: 52) | ATT | |
| | (SEQ ID NO: 427) | |
| | CCAACTCTAAAAACAAA | |
| | AACAA | |
| | (SEQ ID NO: 428) | |
| TCEB3BP1 | GAGTTGGTTTGTTGAG | 325 |
| (SEQ ID NO: 53) | GTGT | |
| | (SEQ ID NO: 429) | |
| | AAAATACCTTCCCACTA | |
| | ACCTT | |
| | (SEQ ID NO: 430) | |
| Q8NCX8 | TAGTGGAATTATGAGG | 300 |
| (SEQ ID NO: 54) | GGG | |
| | (SEQ ID NO: 431) | |
| | CCAAATACACCTCTACC | |
| | AAAA | |
| | (SEQ ID NO: 432) | |
| SEQ ID NO: 55 | CCTTACCCTCCTCTCCT | 384 |
| (SEQ ID NO: 55) | AAA | |
| | (SEQ ID NO: 434) | |
| | AGGATTTGTGGTTGG | |
| | GTT | |
| | (SEQ ID NO: 433) | |
| SNAPC2 | GGTTTAGGGTATTTTAA | 362 |
| (SEQ ID NO: 56) | GGGG | |
| | (SEQ ID NO: 435) | |
| | AAACTAAATCCAACTCC | |
| | CAAA | |
| | (SEQ ID NO: 436) | |
| PTPRN2 | CCCTCTAGTCACTTTAC | 378 |
| (SEQ ID NO: 57) | CAAAA | |
| | (SEQ ID NO: 436) | |
| | GGGGAGGTGTTTAGTG | |
| | GTT | |
| | (SEQ ID NO: 437) | |
| WDFY3 | TGTTGGTGGTTATTTTT | 435 |
| (SEQ ID NO: 58) | AATTTTT | |
| | (SEQ ID NO: 439) | |
| | ACCCAATTATCCTTTCT | |
| | CAAC | |
| | (SEQ ID NO: 440) | |
| ZNF566 | GAGGATTTGTGTTAAG | 457 |
| (SEQ ID NO: 59) | GTTTTT | |
| | (SEQ ID NO: 441) | |
| | CCAACTCCACTATCTAC | |
| | CACAT | |
| | (SEQ ID NO: 442) | |
| Q9NP73 | GGGGTTTTAAGAGTTG | |
| (SEQ ID NO: 60) | GTTTT | |
| | (SEQ ID NO: 443) | |
| | CCTCCCTCACTCACTTA | |
| | CAA | |
| | (SEQ ID NO: 444) | |
| SEQ ID NO: 61 | TGGGGATATTGGATGT | 497 |
| (SEQ ID NO: 61) | TTTT | |
| | (SEQ ID NO: 445) | |
| | CCTTCCAACCTAACCTC | |
| | C | |
| | (SEQ ID NO: 446) | |
| Q86SP6 | CCCAACACTCATTTACA | 342 |
| (SEQ ID NO: 62) | CTATCT | |
| | (SEQ ID NO: 448) | |
| | GGAGTTTTAATTTTTGG | |
| | GATTT | |
| | (SEQ ID NO: 447) | |

TABLE 10

Detection oligonucleotides
according to Example 3.

| | | |
|---|---|---|
| No: | Gene | Oligo: |

| | | |
|---|---|---|
| 1 | ONECUT2 | TAGAGGCGCGGGTTAT |
| | (SEQ ID NO: 14) | (SEQ ID NO: 449) |
| 2 | ONECUT2 | TAGAGGTGTGGGTTAT |
| | (SEQ ID NO: 14) | (SEQ ID NO: 450) |
| 3 | ONECUT2 | TTGCGATTGGTACGTA |
| | (SEQ ID NO: 14) | (SEQ ID NO: 451) |
| 4 | QNECUT2 | TGTGATTGGTATGTAGT |
| | (SEQ ID NO: 14) | (SEQ ID NO: 452) |
| 5 | ONECUT2 | TTTTGTGCGTACGGAT |
| | (SEQ ID NO: 14) | (SEQ ID NO: 453) |
| 6 | ONECUT2 | TTTTTGTGTGTATGGAT |
| | (SEQ ID NO: 14) | (SEQ ID NO: 454) |
| 7 | ONECUT2 | TTAAGCGGGCGTTGAT |
| | (SEQ ID NO: 14) | (SEQ ID NO: 455) |
| 8 | ONECUT2 | TTAAGTGGGTGTTGAT |
| | (SEQ ID NO. 14) | (SEQ ID NO: 456) |
| 9 | MX1 | GTTACGAGTTTATTCGA |
| | (SEQ ID NO: 15) | (SEQ ID NO: 457) |
| 10 | MX1 | GGTTATGAGTTTATTTGAA |
| | (SEQ ID NO: 15) | (SEQ ID NO: 458) |
| 11 | MX1 | AACGCGCGPAAGTAAA |
| | (SEQ ID NO: 15) | (SEQ ID NO: 459) |
| 12 | MX1 | TTGGGAATGTGTGAAA |
| | (SEQ ID NO: 15) | (SEQ ID NO: 460) |
| 13 | MX1 | GAGTTTTCGTCGATTT |
| | (SEQ ID NO: 15) | (SEQ ID NO: 461) |
| 14 | MX1 | AGGAGTTTTTGTTGATT |
| | (SEQ ID NO: 15) | (SEQ ID NO: 462) |
| 15 | MX1 | TATGCGCGGGAAGATT |
| | (SEQ ID NO: 15) | (SEQ ID NO: 463) |
| 16 | MX1 | GTATGTGTGGGAAGAT |
| | (SEQ ID NO: 15) | (SEQ ID NO: 464) |
| 17 | DOCK10 | GATCGGAATTCGGGTT |
| | (SEQ ID NO: 16) | (SEQ ID NO: 465) |
| 18 | DOCK10 | ATTGGAATTTGGGTTG |
| | (SEQ ID NO: 16) | (SEQ ID NO: 466) |
| 19 | DOCK10 | TAGTAGTCGCGTTTTT |
| | (SEQ ID NO: 16) | (SEQ ID NO: 467) |
| 20 | DOCK10 | AGTAGTTGTGTTTTTGG |
| | (SEQ ID NO: 16) | (SEQ ID NO: 468) |
| 21 | DOCK10 | ATTTTCGCGGGAAGTT |
| | (SEQ ID NO: 16) | (SEQ ID NO: 469) |
| 22 | DOCK10 | GTGATTTTTGTGGGAA |
| | (SEQ ID NO: 16) | (SEQ ID NO: 470) |
| 23 | BTG4 | AGTTAGCGTTTGTCGG |
| | (SEQ ID NO: 17) | (SEQ ID NO: 471) |
| 24 | BTG4 | TAGTTAGTGTTTGTTGG |
| | (SEQ ID NO: 17) | (SEQ ID NO: 472) |
| 25 | BTG4 | TTCGGCGTCGATGTAT |
| | (SEQ ID NO: 17) | (SEQ ID NO: 473) |
| 26 | BTG4 | TTTGGTGTTGATGTATT |
| | (SEQ ID NO: 17) | (SEQ ID NO: 474) |
| 27 | DMRTC2 | GGGTATTCGACGTTTT |
| | (SEQ ID NO: 18) | (SEQ ID NO: 475) |
| 28 | DMRTC2 | AGGGGTATTTGATGTTT |
| | (SEQ ID NO 18) | (SEQ ID NO: 476) |
| 29 | DMRTC2 | ATTCGAAGCGTTATTG |
| | (SEQ ID NO 18) | (SEQ ID NO: 477) |
| 30 | DMRTC2 | TTTGAAGTGTTATTGGT |
| | (SEQ ID NO: 18) | (SEQ ID NO: 478) |
| 31 | DMRTC2 | AAAATCGTATTGGTCGT |
| | (SEQ ID NO: 18) | (SEQ ID NO: 479) |
| 32 | DMRTC2 | AAATTGTATTGGTTGTTT |
| | (SEQ ID NO: 18) | (SEQ ID NO: 480) |
| 33 | DMRTC2 | AATTCGTGTATAGATCGG |
| | (SEQ ID NO: 18) | (SEQ ID NO: 481) |
| 34 | DMRTC2 | ATTTGTGTATAGATTGGG |
| | (SEQ ID NO: 18) | (SEQ ID NO: 482) |
| 35 | DMRTC2 | AAAAGTAGCGCGAGTT |
| | (SEQ ID NO: 18) | (SEQ ID NO: 483) |
| 36 | DMRTC2 | AGTAGTGAGTTTGG |
| | (SEQ ID NO: 18) | (SEQ ID NO: 484) |
| 37 | GPR7 | GAACGTAGTCGCGGTT |
| | (SEQ ID NO: 19) | (SEQ ID NO: 485) |
| 38 | GPR7 | GGAATGTAGTTGTGGT |
| | (SEQ ID NO: 19) | (SEQ ID NO: 486) |
| 39 | GPR7 | ATTTTGGCGAATTCGG |
| | (SEQ ID NO: 19) | (SEQ ID NO: 487) |
| 40 | GPR7 | TGGTGAATTTGGGGGA* |
| | (SEQ ID NO: 19) | (SEQ ID NO: 488) |
| 41 | GPR7 | TTAGTCGGTAGGCGTT |
| | (SEQ ID NO: 19) | (SEQ ID NO: 489) |
| 42 | GPR7 | ATTTAGTTGGTAGGTGT |
| | (SEQ ID NO: 19) | (SEQ ID NO: 490) |
| 43 | GPR7 | TTTTCGTAGTCGGCGG |
| | (SEQ ID NO: 19) | (SEQ ID NO: 491) |
| 44 | GPR7 | TTTTTTGTAGTTGGTGG |
| | (SEQ ID NO: 19) | (SEQ ID NO: 492) |
| 45 | FAT | TAAGCGTTAATAGAACGA |
| | (SEQ ID NO: 20) | (SEQ ID NO: 493) |
| 46 | FAT | AGTGTTAATAGAATGAAAT |
| | (SEQ ID NO: 20) | (SEQ ID NO: 494) |
| 47 | FAT | TTGTATTTCGTCGTTAT |
| | (SEQ ID NO: 20) | (SEQ ID NO: 495) |
| 48 | FAT | TTTTGTTGTTATAGGAGT |
| | (SEQ ID NO: 20) | (SEQ ID NO: 496) |
| 49 | FAT | ATAGGAGTCGTCGAGA |
| | (SEQ ID NO: 20) | (SEQ ID NO: 497) |
| 50 | FAT | ATAGGAGTTGTTGAGAG |
| | (SEQ ID NO: 20) | (SEQ ID NO: 498) |
| 51 | ISL1 | TTAATGCGGTCGGTTA |
| | (SEQ ID NO: 21) | (SEQ ID NO: 499) |
| 52 | ISL1 | AGTTAATGTGGTTGGT |
| | (SEQ ID NO: 21) | (SEQ ID NO: 500) |
| 53 | GPRK5 | TTTGATTCGCGGTCGG |
| | (SEQ ID NO: 22) | (SEQ ID NO: 501) |
| 54 | GPRK5 | ATTTGATTTGTGGTTGG |
| | (SEQ ID NO: 22) | (SEQ ID NO: 502) |
| 55 | GPRK5 | TATCGTCGGTCGAGTT |
| | (SEQ ID NO: 22) | (SEQ ID NO: 503) |
| 56 | GPRK5 | TTTATTGTTGGTTGAGT |
| | (SEQ ID NO: 22) | (SEQ ID NO: 504) |
| 57 | GPRK5 | ATGTCGAGAGTTCGTA |
| | (SEQ ID NO: 22) | (SEQ ID NO: 505) |
| 58 | GPRK5 | ATAGGAGTCGTCGAGA |
| | (SEQ ID NO: 22) | (SEQ ID NO: 506) |
| 59 | SLC35F2 | TTTCGGCGTTTAAAAT |
| | (SEQ ID NO: 23) | (SEQ ID NO: 507) |
| 60 | SLC35F2 | TTTTTGGTGTTTAAAATTT |
| | (SEQ ID NO: 23) | (SEQ ID NO: 508) |
| 61 | SLC35F2 | ATTTTCGAAGTGTCGG |
| | (SEQ ID NO: 23) | (SEQ ID NO: 509) |
| 62 | SLC35F2 | TTTGAAGTGTTGGGTT |
| | (SEQ ID NO: 23) | (SEQ ID NO: 510) |
| 63 | SLC35F2 | TTTCGGAAGACGGGAG |
| | (SEQ ID NO: 23) | (SEQ ID NO: 511) |
| 64 | SLC35F2 | TTTTGGAAGATGGGAG |
| | (SEQ ID NO: 23) | (SEQ ID NO: 512) |
| 65 | SLC35F2 | AATTCGGTCGTCGTTT |
| | (SEQ ID NO: 23) | (SEQ ID NO: 513) |
| 66 | SLC35F2 | AGAATTTGGTTGTTGTT |
| | (SEQ ID NO: 23) | (SEQ ID NO: 514) |
| 67 | C14orf59 | GACGTAGGGACGGAGA |
| | (SEQ ID NO: 24) | (SEQ ID NO: 515) |
| 68 | C14orf59 | GATGTAGGGATGGAGA |
| | (SEQ ID NO: 24) | (SEQ ID NO: 516) |
| 69 | C14orfS9 | TATCGTGGTTTTTTACGTAT |
| | (SEQ ID NO: 24) | (SEQ ID NO: 517) |
| 70 | C14orf59 | ATTGTGGTTTTTTATGTATA |
| | (SEQ ID NO: 24) | (SEQ ID NO: 518) |
| 71 | C14orf59 | GTGTTCGAGAGCGAGT |
| | (SEQ ID NO: 24) | (SEQ ID NO: 519) |
| 72 | C14orf59 | TGTTTGAGAGTGAGTGT |
| | (SEQ ID NO: 24) | (SEQ ID NO: 520) |
| 73 | C14orf59 | TTTATTCGGTGTTCGA |
| | (SEQ ID NO: 24) | (SEQ ID NO: 521) |
| 74 | C14orf59 | TATTTGGTGTTTGAGAG |
| | (SEQ ID NO: 24) | (SEQ ID NO: 522) |
| 75 | SNRPN | TTTTTTGCGGTCGCGTA |
| | (SEQ ID NO: 25) | (SEQ ID NO: 523) |
| 76 | SNRPN | TTTTGTGGTTGTGTAGG |
| | (SEQ ID NO: 25) | (SEQ ID NO: 524) |
| 77 | SNRPN | AGTATGCGCGTTAGTT |
| | (SEQ ID NO: 25) | (SEQ ID NO: 525) |
| 78 | SNRPN | TGAGTATGTGTGTTAGT |
| | (SEQ ID NO: 25) | (SEQ ID NO: 526) |
| 79 | SNRPN | TAGCGGTAGGTTTCGTA |
| | (SEQ ID NO: 25) | (SEQ ID NO: 527) |
| 80 | SNRPN | TAGTGGTAGGTTTTGTA |
| | (SEQ ID NO: 25) | (SEQ ID NO: 528) |
| 81 | SNRPN | TTTGCGTTAGATTCGT |
| | (SEQ ID NO: 25) | (SEQ ID NO: 529) |
| 82 | SNRPN | TGTGTTAGATTTGTTGT |
| | (SEQ ID NO: 25) | (SEQ ID NO: 530) |
| 83 | ARHGEF18 | GTCGATTCGGTTGATT |
| | (SEQ ID NO: 26) | (SEQ ID NO: 531) |
| 84 | ARHGEF18 | AAGGTTGATTTGGTTG |
| | (SEQ ID NO: 26) | (SEQ ID NO: 532) |
| 85 | ARHGEF18 | GGCGGTTTCGAAGATT |
| | (SEQ ID NO: 26) | (SEQ ID NO: 533) |
| 86 | ARHGEF18 | AGATGGGTGGTTTTGA |
| | (SEQ ID NO: 26) | (SEQ ID NO: 534) |
| 87 | ARHGEF18 | AAGTCGGTTATGAGCGA |
| | (SEQ ID NO: 26) | (SEQ ID NO: 535) |
| 88 | ARHGEF18 | AAGTTGGTTATGAGTGA |
| | (SEQ ID NO: 26) | (SEQ ID NO: 536) |
| 89 | ARHGEF18 | TGGTCGATACGGTATT |
| | (SEQ ID NO: 26) | (SEQ ID NO: 537) |
| 90 | ARHGEF18 | TTGTGGTTGATATGGT |
| | (SEQ ID NO: 26) | (SEQ ID NO: 538) |
| 91 | SNX8 | AGGACGCGATAGGGAT |
| | (SEQ ID NO: 27) | (SEQ ID NO: 539) |
| 92 | SNX8 | AGGATGTGATAGGGAT |
| | (SEQ ID NO: 27) | (SEQ ID NO: 540) |
| 93 | SNX8 | ATTTCGTCGTATGTGA |
| | (SEQ ID NO: 27) | (SEQ ID NO: 541) |
| 94 | SNX8 | ATTTTGTTGTATGTGAAG |
| | (SEQ ID NO: 27) | (SEQ ID NO: 542) |
| 95 | SNX8 | GTCGTTTGCGTATTTA |
| | (SEQ ID NO: 27) | (SEQ ID NO: 543) |
| 96 | SNX8 | GGTTGTTTGTGTATTTAA |
| | (SEQ ID NO; 27) | (SEQ ID NO: 544) |
| 97 | SNX8 | ATTGTATACGCGCGTT |
| | (SEQ ID NO: 27) | (SEQ ID NO: 545) |
| 98 | SNX8 | TTGTATATGTGTGTTGG |
| | (SEQ ID NO: 27) | (SEQ ID NO: 546) |
| 99 | FBN2 | TAAAGCGAGTAGACGG |
| | (SEQ ID NO: 28) | (SEQ ID NO: 547) |
| 100 | FBN2 | TATAAAGTGAGTAGATGG |
| | (SEQ ID NO: 28) | (SEQ ID NO: 548) |
| 101 | HOXB5 | ATAGTTTTCGGCGGGT |
| | (SEQ ID NO: 29) | (SEQ ID NO: 549) |
| 102 | HOXB5 | TATAGTTTTTGGTGGGT |
| | (SEQ ID NO: 29) | (SEQ ID NO: 550) |
| 103 | HOXB5 | TTTTTCGGCGTAGATA |
| | (SEQ ID NO: 29) | (SEQ ID NO: 551) |
| 104 | HOXB5 | TGTTTTTTGGTGTAGAT |
| | (SEQ ID NO: 29) | (SEQ ID NO: 552) |
| 105 | HOXB5 | AGTCGAGGGCGTTAGA |
| | (SEQ ID NO: 29) | (SEQ ID NO: 553) |
| 106 | HOXB5 | AGTTGAGGGTGTTAGA |
| | (SEQ ID NO: 29) | (SEQ ID NO: 554) |
| 107 | HOXB5 | TTTTCGAGGAATTCGT |
| | (SEQ ID NO: 29) | (SEQ ID NO: 555) |
| 108 | HOXB5 | TTTTTTGAGGAATTTGTT |
| | (SEQ ID NO: 29) | (SEQ ID NO: 556) |
| 109 | LIMK1 | TATCGGATTATCGCGG |
| | (SEQ ID NO: 30) | (SEQ ID NO: 557) |
| 110 | LIMK1 | ATTGGATTATTGTGGGG |
| | (SEQ ID NO: 30) | (SEQ ID NO: 559) |
| 111 | LIMK1 | GTCGGTAGTTTATCGGAT |
| | (SEQ ID NO: 30) | (SEQ ID NO: 560) |
| 112 | LIMK1 | GTTGGTAGTTTATTGGAT |
| | (SEQ ID NO: 30) | (SEQ ID NO: 561) |
| 113 | LIMK1 | TAGGAGACGTTACGTT |
| | (SEQ ID NO: 30) | (SEQ ID NO: 562) |
| 114 | LIMK1 | AGATGTTATGTTAGGGT |
| | (SEQ ID NO: 30) | (SEQ ID NO: 563) |
| 115 | PSD/Q9H469 | TTTTTCGAAGCGGATT |
| | (SEQ ID NO: 31) | (SEQ ID NO: 563) |
| 116 | PSD/Q9H469 | TTTGAAGTGGATTTTGG |
| | (SEQ ID NO: 31) | (SEQ ID NO: 564) |
| 117 | PSD/Q9H469 | GAAACGCGGTTTAAAT |
| | (SEQ ID NO: 31) | (SEQ ID NO: 565) |
| 118 | PSD/Q9H469 | GGAAATGTGGTTTAAATT |
| | (SEQ ID NO: 32) | (SEQ ID NO: 567) |
| 119 | SLC38A1 | TTTGCGGTAACGTTTA |
| | (SEQ ID NO: 32) | (SEQ ID NO: 568) |
| 120 | SLC3BA1 | TTGTGGTAATGTTTAGG |
| | (SEQ ID NO: 32) | (SEQ ID NO: 568) |
| 121 | SLC38A1 | TAGCGGTCGCGATTA |
| | (SEQ ID NO: 32) | (SEQ ID NO: 569) |
| 122 | SLC38A1 | GTAGTGGTTGTGGATT |
| | (SEQ ID NO: 32) | (SEQ ID NO: 570) |
| 123 | SLC38A1 | TTAGGGACGCGAATTA |
| | (SEQ ID NO: 32) | (SEQ ID NO: 571) |
| 124 | SLC38A1 | AGGGATGTGAATTAGG |
| | (SEQ ID NO: 32) | (SEQ ID NO: 572) |
| 125 | SLC38A1 | TGCGTTTAAGATCGCGT |
| | (SEQ ID NO: 32) | (SEQ ID NO: 573) |
| 126 | SLC38A1 | TGTGTTTAAGATTGTGT |
| | (SEQ ID NO: 32) | (SEQ ID NO: 574) |
| 127 | SLC38A1 | ATTTCGGTTTTCGAAA |
| | (SEQ ID NO: 32) | (SEQ ID NO: 575) |
| 128 | SLC38A1 | ATATTTTGGTTTTTGAAAA |
| | (SEQ ID NO: 32) | (SEQ ID NO: 576) |
| 129 | SLC38A1 | AGAGCGTAGTTGATTCGA |
| | (SEQ ID NO: 32) | (SEQ ID NO: 577) |
| 130 | SLC38A1 | AGAGTGTAGTTGATTTGA |
| | (SEQ ID NO: 32) | (SEQ ID NO: 578) |
| 131 | SLC38A1 | AGGAATTACGTACGTT |
| | (SEQ ID NO: 32) | (SEQ ID NO: 579) |
| 132 | SLC38A1 | TATGTATGTTTGGAGGG |
| | (SEQ ID NO: 32) | (SEQ ID NO: 580) |
| 133 | SLC38A1 | TTTGTAACGCGGGGAA |
| | (SEQ ID NO: 32) | (SEQ ID NO: 581) |
| 134 | SLC38A1 | TTTTGTAATGTGGGGA |
| | (SEQ ID NO: 32) | (SEQ ID NO: 582) |
| 135 | HIST1H4J | TATGGCGGTGATCGTT |
| | (SEQ ID NO: 33) | (SEQ ID NO: 583) |
| 136 | HIST1H4J | TTTATGGTGGTGATTGT |
| | (SEQ ID NO: 33) | (SEQ ID NO: 584) |
| 137 | HIST1H4J | TTACGGCGTTTCGGAT |
| | (SEQ ID NO: 33) | (SEQ ID NO: 585) |
| 138 | HIST1H4J | TTATGGTGTTTTGGATT |
| | (SEQ ID NO: 33) | (SEQ ID NO: 586) |
| 139 | HIST1H4J | ATGCGTTTTACGTCGT |
| | (SEQ ID NO: 33) | (SEQ ID NO: 587) |
| 140 | HIST1H4J | AGATGTGTTTTATGTTGT |
| | (SEQ ID NO: 33) | (SEQ ID NO: 588) |
| 141 | HISTIH4J | TATTGTCGCGTAGTAT |
| | (SEQ ID NO: 33) | (SEQ ID NO: 589) |
| 142 | HIST1H4J | GGATATTGTTGTGTAGT |
| | (SEQ ID NO: 33) | (SEQ ID NO: 590) |
| 143 | HIST1H4J | ATCGAAATCGTAGAGG |
| | (SEQ ID NO: 33) | (SEQ ID NO: 591) |
| 144 | HIST1H4J | ATTGAAATTGTAGAGGG |
| | (SEQ ID NO: 33) | (SEQ ID NO: 592) |
| 145 | Q96S01 | ATCGGTTTTTCGAGGT |
| | (SEQ ID NO: 34) | (SEQ ID NO: 593) |
| 146 | Q96S01 | ATTGGTTTTTTGAGGTT |
| | (SEQ ID NO: 34) | (SEQ ID NO: 594) |
| 147 | Q96S01 | GGTCGATTTTCGCGTA |
| | (SEQ ID NO: 34) | (SEQ ID NO: 595) |
| 148 | Q96S01 | TGGTTGATTTTTGTGTA |
| | (SEQ ID NO: 34) | (SEQ ID NO: 596) |
| 149 | GENOMIC REGION | AATCGTGCGGTTGATA |
| | DOWNSTREAM | (SEQ ID NO: 597) |
| | FROM FOXL2 | |
| | (SEQ ID NO: 35) | |
| 150 | GENOMIC REGION | TGTAGAATTGTGTGGT |
| | DOWNSTREAM | (SEQ ID NO: 598) |
| | FROM FOXL2 | |
| | (SEQ ID NO: 35) | |
| 151 | GENOMIC REGION | AAAATTCGAGGTCGGG |
| | DOWNSTREAM | (SEQ ID NO: 599) |
| | FROM FOXL2 | |
| | (SEQ ID NO: 35) | |
| 152 | GENOMIC REGION | AAAATTTGAGGTTGGG |
| | DOWNSTREAM | (SEQ ID NO: 600) |
| | FROM FOXL2 | |
| | (SEQ ID NO: 35) | |
| 153 | GENOMIC REGION | TTTTCGCGGTTCGGAG |
| | DOWNSTREAM | (SEQ ID NO: 601) |
| | FROM FOXL2 | |
| | (SEQ ID NO: 35) | |
| 154 | GENOMIC REGION | TTTGTGGTTTGGAGAA |
| | DOWNSTREAM | (SEQ ID NO: 602) |
| | FROM FOXL2 | |
| | (SEQ ID NO: 35) | |
| 155 | GENOMIC REGION | AATAGGCGATGTACGG |
| | DOWNSTREAM | (SEQ ID NO: 603) |
| | FROM FOXL2 | |
| | (SEQ ID NO: 35) | |
| 156 | GENOMIC REGION | TAGGTGATGTATGGGT |
| | DOWNSTREAM | (SEQ ID NO: 604) |
| | FROM FOXL2 | |
| | (SEQ ID NO: 35) | |
| 157 | GENOMIC REGION | TTGGTCGGTTAATCGA |
| | DOWNSTREAM | (SEQ ID NO: 605) |
| | FROM FOXL2 | |
| | (SEQ ID NO: 35) | |
| 158 | GENOMIC REGION | TTTGGTTGGTTAATTGA |
| | DOWNSTREAM | (SEQ ID NO: 606) |
| | FROM FOXL2 | |
| | (SEQ ID NO: 35) | |
| 159 | GENOMIC REGION | TAGCGGTCGCGAAAAT |
| | DOWNSTREAM | (SEQ ID NO: 607) |
| | FROM FOXL2 | |
| | (SEQ ID NO: 35) | |
| 160 | GENOMIC REGION | AGTTTAGTGGTTGTGA |
| | DOWNSTREAM | (SEQ ID NO: 608) |
| | FROM FOXL2 | |
| | (SEQ ID NO: 35) | |
| 161 | CMYA3 | TTTACGCGGGGTTTTA |
| | (SEQ ID NO: 13) | (SEQ ID NO: 609) |
| 162 | CMYA3 | TTTATGTGGGGTTTTAG |
| | (SEQ ID NO: 13) | (SEQ ID NO: 610) |
| 163 | CMYA3 | TTACGTCGTTATTAGGT |
| | (SEQ ID NO: 13) | (SEQ ID NO: 611) |
| 164 | CMYA3 | TTTTATGTTGTTATTAGGT |
| | (SEQ ID NO: 13) | (SEQ ID NO: 612) |
| 165 | CMYA3 | TATTTGGACGTCGGGT |
| | (SEQ ID NO: 13) | (SEQ ID NO: 613) |
| 166 | CMYA3 | TATTTGGATGTTGGGT |
| | (SEQ ID NO: 13) | (SEQ ID NO: 614) |
| 167 | CMYA3 | TTTGTCGGAAAGCGGA |
| | (SEQ ID NO: 13) | (SEQ ID NO: 615) |
| 168 | CMYA3 | TTTGTTGGAAAGTGGA |
| | (SEQ ID NO: 13) | (SEQ ID NO: 616) |
| 169 | ORC4L | ATTCGGATCGTTACGT |
| | (SEQ ID NO: 36) | (SEQ ID NO: 617) |
| 170 | ORC4L | ATTTGGATTGTTATGTTT |
| | (SEQ ID NO: 36) | (SEQ ID NO: 618) |
| 171 | ORC4L | ATAAGACGGAGTTCGT |
| | (SEQ ID NO: 36) | (SEQ ID NO: 619) |
| 172 | ORC4L | AAGATGGAGTTTGTTTG |
| | (SEQ ID NO: 36) | (SEQ ID NO: 620) |
| 173 | ORC4L | TTGCGTTATCGACGTT |
| | (SEQ ID NO: 36) | (SEQ ID NO: 621) |
| 174 | ORC4L | ATTTTGTGTTATTGATGT |
| | (SEQ ID NO: 36) | (SEQ ID NO: 622) |
| 175 | ORC4L | GAGTAACGCGTGTGAT |
| | (SEQ ID NO: 36) | (SEQ ID NO: 623) |
| 176 | ORC4L | TATGAGTAATGTGTGTG |
| | (SEQ ID NO: 36) | (SEQ ID NO: 624) |
| 177 | ABHD9 | TATTTGGGCGCGATAG |
| | (SEQ ID NO: 37) | (SEQ ID NO: 625) |
| 178 | ABHD9 | ATTTGGGTGTGATAGG |
| | (SEQ ID NO: 37) | (SEQ ID NO: 626) |
| 179 | ABHD9 | GTGGGACGCGTTGAAG |
| | (SEQ ID NO: 37) | (SEQ ID NO: 627) |
| 180 | ABHD9 | TGTGGGATGTGTTGAA |
| | (SEQ ID NO: 37) | (SEQ ID NO: 628) |
| 181 | ABHD9 | GGCGGTTTCGATAGAA |
| | (SEQ ID NO: 37) | (SEQ ID NO: 629) |
| 182 | ABHD9 | GGGTGGTTTTGATAGA |
| | (SEQ ID NO: 37) | (SEQ ID NO: 630) |
| 183 | CCND2 | ATAAGTCGTTCGAGGT |
| | (SEQ ID NO: 1) | (SEQ ID NO: 631) |
| 184 | CCND2 | AAGTTGTTTGAGGTGT |
| | (SEQ ID NO: 1) | (SEQ ID NO: 632) |
| 185 | CCND2 | TAGCGGTTACGTAGGA |
| | (SEQ ID NO: 1) | (SEQ ID NO: 633) |
| 186 | CCND2 | AGTGGTTATGTAGGAAA |
| | (SEQ ID NO: 1) | (SEQ ID NO: 634) |
| 187 | CCND2 | TACGTGTTTTAACGTAT |
| | (SEQ ID NO: 1) | (SEQ ID NO: 635) |
| 188 | CCND2 | TGATATGTGTTTTAATGTA |
| | (SEQ ID NO: 1) | (SEQ ID NO: 636) |
| 189 | CCND2 | TTAGGGTCGTCGTAGGT |
| | (SEQ ID NO: 1) | (SEQ ID NO: 637) |
| 190 | CCND2 | TTAGGGTTGTTGTAGGT |
| | (SEQ ID NO: 1) | (SEQ ID NO: 638) |
| 191 | CCND2 | TTAGTACGGTCGGTTT |
| | (SEQ ID NO: 1) | (SEQ ID NO: 639) |
| 192 | CCND2 | GTTAGTATGGTTGGTTT |
| | (SEQ ID NO: 1) | (SEQ ID NO: 640) |
| 193 | CDKN2A | TAGGTATCGCGTACGT |
| | (SEQ ID NO: 2) | (SEQ ID NO: 641) |
| 194 | CDKN2A | TTAGGTATTGTGTATGTT |
| | (SEQ ID NO: 2) | (SEQ ID NO: 642) |
| 195 | CDKN2A | TTCGCGTCGTGGAGTA |
| | (SEQ ID NO: 2) | (SEQ ID NO: 643) |
| 196 | CDKN2A | TTTTGTGTTGTGGAGTA |
| | (SEQ ID NO: 2) | (SEQ ID NO: 644) |
| 197 | CDKN2A | TAGTCGCGCGTAGGTA |
| | (SEQ ID NO: 2) | (SEQ ID NO: 645) |
| 198 | CDKN2A | TAGTTGTGTGTAGGTAT |
| | (SEQ ID NO: 2) | (SEQ ID NO: 646) |
| 199 | CDKN2A | TAGGTATCGTGCGATA |
| | (SEQ ID NO: 2) | (SEQ ID NO: 647) |
| 200 | CDKN2A | GTAGGTATTGTGTGATAT |
| | (SEQ ID NO: 2) | (SEQ ID NO: 648) |
| 201 | CD44 | TAGGTTCGGTTCGTTAT |
| | (SEQ ID NO: 3) | (SEQ ID NO: 649) |
| 202 | CD44 | TAGGTTTGGTTTGTTATT |
| | (SEQ ID NO: 3) | (SEQ ID NO: 650) |
| 203 | CD44 | GTTTCGCGTTTAGGGA |
| | (SEQ ID NO: 3) | (SEQ ID NO: 651) |
| 204 | CD44 | GTTTTGTGTTTAGGGAT |
| | (SEQ ID NO: 3) | (SEQ ID NO: 652) |
| 205 | CD44 | GTTCGTTTCGGATATTA |
| | (SEQ ID NO: 3) | (SEQ ID NO: 653) |
| 206 | CD44 | TTTGTTTTGGATATTATGG |
| | (SEQ ID NO: 3) | (SEQ ID NO: 654) |
| 207 | CD44 | TTTGGCGTAGATCGGT |
| | (SEQ ID NO: 3) | (SEQ ID NO: 655) |
| 208 | CD44 | TTTGGTGTAGATTGGT |
| | (SEQ ID NO: 3) | (SEQ ID NO: 656) |
| 209 | EDNRB1 | TTCGTTTTTCGGGAAG |
| | (SEQ ID NO: 4) | (SEQ ID NO: 657) |
| 210 | EDNRB1 | TTTGTTTTTTGGGAAGG |
| | (SEQ ID NO: 4) | (SEQ ID NO: 658) |
| 211 | EDNRB1 | TAGAGTCGGATTCGTT |
| | (SEQ ID NO: 4) | (SEQ ID NO: 659) |
| 212 | EDNRB1 | AGTTGGATTTGTTTGTA |
| | (SEQ ID NO: 4) | (SEQ ID NO: 660) |
| 213 | EDNRB1 | GTATTTTCGTAGCGTT |
| | (SEQ ID NO. 4) | (SEQ ID NO: 661) |
| 214 | EDNRB1 | TGGTATTTTTGTAGTGTT |
| | (SEQ ID NO: 4) | (SEQ ID NO: 662) |
| 215 | EDNRB1 | ATTTCGAGTAAACGGT |
| | (SEQ ID NO: 4) | (SEQ ID NO: 663) |
| 216 | EDNRB1 | TTTGAGTAAATGGTGGA |
| | (SEQ ID NO: 4) | (SEQ ID NO: 664) |
| 217 | ELK1 | TGTCGTACGTTATGTT |
| | (SEQ ID NO: 5) | (SEQ ID NO: 665) |
| 218 | ELK1 | GGTGTTGTATGTTATGT |
| | (SEQ ID NO: 5) | (SEQ ID NO: 666) |
| 219 | ELK1 | TGGGCGTAGTAGTCGG |
| | (SEQ ID NO: 5) | (SEQ ID NO: 667) |
| 220 | ELK1 | ATGGGTGTAGTAGTTGG |
| | (SEQ ID NO: 5) | (SEQ ID NO: 668) |
| 221 | ELK1 | ATTGGGTTTCGCGTAGG |
| | (SEQ ID NO: 5) | (SEQ ID NO: 669) |
| 222 | ELK1 | ATTGGGTTTTGTGTAGG |
| | (SEQ ID NO: 5) | (SEQ ID NO: 670) |
| 223 | ELK1 | TTGATTGGCGGACGAG |
| | (SEQ ID NO: 5) | (SEQ ID NO. 671) |
| 224 | ELK1 | TTGATTGGTGGATGAG |
| | (SEQ ID NO: 5) | (SEQ ID NO: 672) |
| 225 | FOS | TACGGATTTGGTCGTTT |
| | (SEQ ID NO: 6) | (SEQ ID NO: 673) |
| 226 | FOS | TATGGATTTGGTTGTTT |
| | (SEQ ID NO: 6) | (SEQ ID NO: 674) |
| 227 | FOS | TTCGATTAGTTCGGAT |
| | (SEQ ID NO: 6) | (SEQ ID NO: 675) |
| 228 | FOS | TATTTTGATTAGTTTGGAT |
| | (SEQ ID NO: 6) | (SEQ ID NO: 676) |
| 229 | FOS | TTTCGTGGTTTTATCGTA |
| | (SEQ ID NO: 6) | (SEQ ID NO: 677) |
| 230 | FOS | TTTTGTGGTTTTATTGTA |
| | (SEQ ID NO: 6) | (SEQ ID NO: 678) |
| 231 | FOS | GTCGAGCGTAGAGTAT |
| | (SEQ ID NO: 6) | (SEQ ID NO: 679) |
| 232 | FOS | TAGGAGGTTGAGTGTA |
| | (SEQ ID NO: 6) | (SEQ ID NO: 680) |
| 233 | GSTP1 | GTCGGTCGTAGAGGGG |
| | (SEQ ID NO: 7) | (SEQ ID NO: 681) |
| 234 | GSTP1 | GTTGGTTGTAGAGGGG |
| | (SEQ ID NO: 7) | (SEQ ID NO: 682) |
| 235 | GSTP1 | TTCGCGGTTTTCGAGT |
| | (SEQ ID NO: 7) | (SEQ ID NO: 683) |
| 236 | GSTP1 | TTTGTGGTTTTTGAGTT |
| | (SEQ ID NO: 7) | (SEQ ID NO: 684) |
| 237 | GSTP1 | GTCGCGCGTATTTATT |
| | (SEQ ID NO: 7) | (SEQ ID NO: 685) |
| 238 | GSTP1 | GGGTTGTGTGTATTTAT |
| | (SEQ ID NO: 7) | (SEQ ID NO: 686) |
| 239 | GSTP1 | GAGTCGTCGCGTAGTT |
| | (SEQ ID NO: 7) | (SEQ ID NO: 687) |
| 240 | GSTP1 | GGAGTTGTTGTGTAGTT |
| | (SEQ ID NO: 7) | (SEQ ID NO: 688) |
| 241 | CD37 | ATCGAGAGCGTTATGA |
| | (SEQ ID NO: 38) | (SEQ ID NO: 689) |
| 242 | CD37 | AGGAATATTGAGAGTGT |
| | (SEQ ID NO: 38) | (SEQ ID NO: 690) |
| 243 | CD37 | TATCGAGCGAGTCGGT |
| | (SEQ ID NO: 38) | (SEQ ID NO: 691) |
| 244 | CD37 | TATTGAGTGAGTTGGTT |
| | (SEQ ID NO: 38) | (SEQ ID NO: 692) |
| 245 | CD37 | TTAGCGTACGTGACGG |
| | (SEQ ID NO: 38) | (SEQ ID NO: 693) |
| 246 | CD37 | AGTGTATGTGATGGGG |
| | (SEQ ID NO: 38) | (SEQ ID NO: 694) |
| 247 | CD37 | GGGTACGTAGTTACGT |
| | (SEQ ID NO: 38) | (SEQ ID NO: 695) |
| 248 | CD37 | TATGTAGTTATGTGGGT |
| | (SEQ ID NO: 38) | (SEQ ID NO: 696) |
| 249 | GRN | TAGCGCGATGATTCGT |
| | (SEQ ID NO: 39) | (SEQ ID NO: 697) |
| 250 | GRN | AGTGTGATGATTTGTTT |
| | (SEQ ID NO: 39) | (SEQ ID NO: 698) |
| 251 | GRN | TAATCGGGTAGCGTTT |
| | (SEQ ID NO: 39) | (SEQ ID NO: 699) |
| 252 | GRN | TAGTAATTGGGTAGTGT |
| | (SEQ ID NO: 39) | (SEQ ID NO: 700) |
| 253 | GRN | TTCGATTTCGCGGTTT |
| | (SEQ ID NO: 39) | (SEQ ID NO: 701) |
| 254 | GRN | GTTTGATTTTGTGGTTT |
| | (SEQ ID NO: 39) | (SEQ ID NO: 702) |
| 255 | GRN | TTTAACGGGGCGTTAT |
| | (SEQ ID NO: 39) | (SEQ ID NO: 703) |
| 256 | GRN | AATGGGGTGTTATTGT |
| | (SEQ ID NO: 39) | (SEQ ID NO: 704) |
| 257 | EPAS1 | TTCGGCGTTATTCGAG |
| | (SEQ ID NO: 40) | (SEQ ID NO: 705) |
| 258 | EPAS1 | GGTTTGGTGTTATTTGA |
| | (SEQ ID NO: 40) | (SEQ ID NO: 706) |
| 259 | EPAS1 | TATTCGTGCGGTTTTA |
| | (SEQ ID NO: 40) | (SEQ ID NO: 707) |
| 260 | EPAS1 | ATTTGTGTGGTTTTAGT |
| | (SEQ ID NO: 40) | (SEQ ID NO: 708) |
| 261 | EPAS1 | GATTTAACGCGCGGT |
| | (SEQ ID NO: 40) | (SEQ ID NO: 709) |
| 262 | EPAS1 | GGAATTTAATGTGTGGT |
| | (SEQ ID NO: 40) | (SEQ ID NO: 710) |
| 263 | EPAS1 | TTCGCGAGTTTTTCGG |
| | (SEQ ID NO: 40) | (SEQ ID NO: 711) |
| 264 | EPAS1 | TTTGTGAGTTTTTTGGTA |
| | (SEQ ID NO: 40) | (SEQ ID NO: 712) |
| 265 | NOTCH1 | TTTACGGGCGGGAGTT |
| | (SEQ ID NO: 41) | (SEQ ID NO: 713) |
| 266 | NOTCH1 | TTTTATGGGTGGGAGT |
| | (SEQ ID NO: 41) | (SEQ ID NO: 714) |
| 267 | NOTCH1 | TAGCGGGCGAGTAGTT |
| | (SEQ ID NO: 41) | (SEQ ID NO: 715) |
| 268 | NOTCH1 | TAGTGGGTGAGTAGTT |
| | (SEQ ID NO: 41) | (SEQ ID NO: 716) |
| 269 | NOTCH 1 | AGGCGGTTTCGATTTT |
| | (SEQ ID NO: 41) | (SEQ ID NO: 717) |
| 270 | NOTCH1 | TGGAGGTGGTTTTGAT |
| | (SEQ ID NO: 41) | (SEQ ID NO: 718) |
| 271 | NOTCH1 | ATTTCGGCGGTTGGAT |
| | (SEQ ID NO: 41) | (SEQ ID NO: 719) |
| 272 | NOTCH1 | AGGTAATTTTGGTGGTT |
| | (SEQ ID NO: 41) | (SEQ ID NO: 720) |
| 273 | MLLT3 | TAATTCGGTTAGATTTTCGG |
| | (SEQ ID NO: 42) | (SEQ ID NO: 721) |
| 274 | MLLT3 | TAATTTGGTTAGATTTTTGG |
| | (SEQ ID NO: 42) | (SEQ ID NO: 722) |
| 275 | MLLT3 | TTTAGAGTCGCGTTTT |
| | (SEQ ID NO: 42) | (SEQ ID NO: 723) |
| 276 | MLLT3 | TAGAGTTGTGTTTTTGT |
| | (SEQ ID NO: 42) | (SEQ ID NO: 724) |
| 277 | MLLT3 | TAGAATAGCGCGGTTTA |
| | (SEQ ID NO: 42) | (SEQ ID NO: 725) |
| 278 | MLLT3 | GATAGAATAGTGTGGTTA |
| | (SEQ ID NO: 42) | (SEQ ID NO: 726) |
| 279 | SOLH | TAGGGGACGTGTACGA |
| | (SEQ ID NO: 43) | (SEQ ID NO: 727) |
| 280 | SOLH | TAGGGGATGTGTATGA |
| | (SEQ ID NO: 43) | (SEQ ID NO: 728) |
| 281 | SOLH | GACGGAACGTATGTTT |
| | (SEQ ID NO: 43) | (SEQ ID NO: 729) |
| 282 | SOLH | TGGGGATGGAATGTAT |
| | (SEQ ID NO: 43) | (SEQ ID NO: 730) |
| 283 | SOLH | ATTCGTGGGGACGGAA |
| | (SEQ ID NO: 43) | (SEQ ID NO: 731) |
| 284 | SOLH | ATTTGTGGGGATGGAA |
| | (SEQ ID NO: 43) | (SEQ ID NO: 732) |
| 285 | SEQ ID NO: 44 | TAGGGTTCGUCGTATT |
| | (SEQ ID NO: 44) | (SEQ ID NO: 733) |
| 286 | SEQ ID NO: 44 | TTTAGGGTTTGTTTGTAT |
| | (SEQ ID NO: 44) | (SEQ ID NO: 734) |
| 287 | SEQ ID NO: 44 | TTACGATTTTCGGGGT |
| | (SEQ ID NO: 44) | (SEQ ID NO: 735) |
| 288 | SEQ ID NO: 44 | TTTATGATTTTTGGGGT |
| | (SEQ ID NO: 44) | (SEQ ID NO: 736) |
| 289 | SEQ ID NO: 44 | AAGTAGACGTCGGAGA |
| | (SEQ ID NO: 44) | (SEQ ID NO: 737) |
| 290 | SEQ ID NO: 44 | TAGATGTTGGAGAGGG |
| | (SEQ ID NO: 44) | (SEQ ID NO: 738) |
| 291 | SEQ ID NO: 44 | TGTCGTTACGTTTAGG |
| | (SEQ ID NO: 44) | (SEQ ID NO: 739) |
| 292 | SEQ ID NO: 44 | GTTGTTATGTTTAGGGT |
| | (SEQ ID NO: 44) | (SEQ ID NO: 740) |
| 293 | Q8N365 | AGATTCGGAGAGAGGG |
| | (SEQ ID NO: 45) | (SEQ ID NO: 741) |
| 294 | Q8N365 | TAGATTTGGAGAGATGG |
| | (SEQ ID NO: 45) | (SEQ ID NO: 742) |
| 295 | Q8N365 | AGATCGGCGTAGGGAT |
| | (SEQ ID NO: 45) | (SEQ ID NO: 743) |
| 296 | Q8N365 | AGATTGGTGTAGGGAT |
| | (SEQ ID NO: 45) | (SEQ ID NO: 744) |
| 297 | Q8N365 | TACGTGTTATCGGCGA |
| | (SEQ ID NO: 45) | (SEQ ID NO: 745) |
| 298 | Q8N365 | TATGTGTTATTGGTGATA |
| | (SEQ ID NO: 45) | (SEQ ID NO: 746) |
| 299 | Q8N365 | TACGTGTCGGGTCGTA |
| | (SEQ ID NO: 45) | (SEQ ID NO: 747) |
| 300 | Q8N365 | GTATGTGTTGGGTTGTA |
| | (SEQ ID NO: 45) | (SEQ ID NO: 748) |
| 301 | Q9NWV0 | GTCGCGTGGATACGTG |
| | (SEQ ID NO: 46) | (SEQ ID NO: 749) |
| 302 | Q9NWV0 | GGTTGTGTGGATATGT |
| | (SEQ ID NO: 46) | (SEQ ID NO: 750) |
| 303 | Q9NWV0 | TTGGCGATTTTTACGA |
| | (SEQ ID NO: 46) | (SEQ ID NO: 751) |
| 304 | Q9NWV0 | TTGGTGATTTTTATGAGA |
| | (SEQ ID NO: 46) | (SEQ ID NO: 752) |
| 305 | Q9NWV0 | TGTCGTAGCGTTATGT |
| | (SEQ ID NO: 46) | (SEQ ID NO: 753) |
| 306 | Q9NWV0 | AGGTGTTGTAGTGTTAT |
| | (SEQ ID NO: 46) | (SEQ ID NO: 754) |
| 307 | SEQ ID NO: 47 | GTAACGCGTTTGGTTT |
| | (SEQ ID NO: 47) | (SEQ ID NO: 755) |
| 308 | SEQ ID NO: 47 | TGGTAATGTGTTTGGT |
| | (SEQ ID NO: 47) | (SEQ ID NO: 756) |
| 309 | SEQ ID NO: 47 | TTCGAGCGTTTTACGT |
| | (SEQ ID NO: 47) | (SEQ ID NO: 757) |
| 310 | SEQ ID NO: 47 | TTTTGAGTGTTTTATGTT |
| | (SEQ ID NO: 47) | (SEQ ID NO: 758) |
| 311 | SEQ ID NO: 47 | TTACGTGGGAGCGTTT |
| | (SEQ ID NO: 47) | (SEQ ID NO: 759) |
| 312 | SEQ ID NO: 47 | TTATGTGGGAGTGTTT |
| | (SEQ ID NO: 47) | (SEQ ID NO: 760) |
| 313 | SEQ ID NO: 47 | TAGTTTTACGCGGGTA |
| | (SEQ ID NO: 47) | (SEQ ID NO: 761) |
| 314 | SEQ ID NO:47 | AGTTTTATGTGGGTATG |
| | (SEQ ID NO: 47) | (SEQ ID NO: 762) |
| 315 | H2AFY2 | ATGAAAGGCGCGAGAA |
| | (SEQ ID NO: 48) | (SEQ ID NO: 763) |
| 318 | H2AFY2 | ATGAAAGGTGTGAGAA |
| | (SEQ ID NO: 48) | (SEQ ID NO: 764) |
| 317 | H2AFY2 | GAATCGTGGTTTCGTT |
| | (SEQ ID NO: 48) | (SEQ ID NO: 765) |
| 318 | H2AFY2 | GGAATTGTGGTTTTGT |
| | (SEQ ID NO: 48) | (SEQ ID NO: 766) |
| 319 | H2AFY2 | TAGTTTATCGCGGTAA |
| | (SEQ ID NO: 48) | (SEQ ID NO: 767) |
| 320 | H2AFY2 | TTTATTGTGGTAAATGGT |
| | (SEQ ID NO: 48) | (SEQ ID NO: 768) |
| 321 | RHOC | TGCGGTTCGAAGATTA |
| | (SEQ ID NO: 49) | (SEQ ID NO: 769) |
| 322 | RHOC | GGTGTGGTTTGAAGAT |
| | (SEQ ID NO: 49) | (SEQ ID NO: 770) |
| 323 | RHOC | GAACGCGTTTTAGCGT |
| | (SEQ ID NO: 49) | (SEQ ID NO: 771) |
| 324 | RHOC | GGAATGTGTTTTAGTGT |
| | (SEQ ID NO: 49) | (SEQ ID NO: 772) |
| 325 | RHOC | TTTTAGCGTCGGGGAT |
| | (SEQ ID NO: 49) | (SEQ ID NO: 773) |
| 326 | RHOC | TTTTAGTGTTGGGGAT |
| | (SEQ ID NO: 49) | (SEQ ID NO: 774) |
| 327 | NR2E1 | TAGTCGTATTAGCGGT |
| | (SEQ ID NO: 50) | (SEQ ID NO: 775) |
| 328 | NR2E1 | TAGTTGTATTAGTGGTTT |
| | (SEQ ID NO: 50) | (SEQ ID NO: 776) |
| 329 | NR2E1 | TGCGTTTTATTCGCGG |
| | (SEQ ID N0 50) | (SEQ ID NO: 777) |
| 330 | NR2E1 | TGTGTTTTATTTGTGGT |
| | (SEQ ID NO: 50) | (SEQ ID NO: 778) |
| 331 | NR2E1 | TTTCGAAGTTTCGCGG |
| | (SEQ ID NO: 50) | (SEQ ID NO: 779) |
| 332 | NR2E1 | TTTGAAGTTTTGTGGG |
| | (SEQ ID NO: 50) | (SEQ ID NO: 780) |
| 333 | NR2E1 | TAGCGCGAATCGTTTA |
| | (SEQ ID NO: 50) | (SEQ ID NO: 781) |
| 334 | NR2E1 | AGTGTGAATTGTTTAGT |
| | (SEQ ID NO: 50) | (SEQ ID NO: 782) |
| 335 | KBTBD6 | AGACGTTTCGCGTTTT |
| | (SEQ ID NO: 51) | (SEQ ID NO: 783) |
| 336 | KBTBD6 | GAAGATGTTTTGTGTTT |
| | (SEQ ID NO: 51) | (SEQ ID NO: 784) |
| 337 | KBTBD6 | TTTCGGGAAGACGTTT |
| | (SEQ ID NO: 51) | (SEQ ID NO. 785) |
| 338 | KBTBD6 | AGTTTTGGGAAGATGT |
| | (SEQ ID NO: 51) | (SEQ ID NO: 786) |
| 339 | KBTBD6 | TATTAGCGTTCGTCGT |
| | (SEQ ID NO: 51) | (SEQ ID NO: 787) |
| 340 | KBTBD6 | GTTATTAGTGTTTGTTGT |
| | (SEQ ID NO: 51) | (SEQ ID NO: 788) |
| 341 | TRPM4 | TAGGTGAGCGTCGGAT |
| | (SEQ ID NO: 52) | (SEQ ID NO: 789) |
| 342 | TRPM4 | TAGGTGAGTGTTGGAT |
| | (SEQ ID NO: 52) | (SEQ ID NO: 790) |
| 343 | TRPM4 | AGTAGAGTCGGCGGAG |
| | (SEQ ID NO: 52) | (SEQ ID NO: 791) |
| 344 | TRPM4 | AGTAGAGTTGGTGGAG |
| | (SEQ ID NO: 52) | (SEQ ID NO: 792) |
| 345 | TCEB3BP1 | GACGTTAGCGAGTATT |
| | (SEQ ID NO: 53) | (SEQ ID NO: 793) |
| 346 | TCEB3BP1 | AGGGATGTTAGTGAGT |
| | (SEQ ID NO: 53) | (SEQ ID NO: 794) |
| 347 | TCEB3BP1 | TGTCGGGTCGAGTAGT |
| | (SEQ ID NO: 53) | (SEQ ID NO: 795) |
| 348 | TCEB3BP1 | TGTTGGGTTGAGTAGT |
| | (SEQ ID NO: 53) | (SEQ ID NO: 796) |
| 349 | Q8NCX8 | TTACGGCGGGTTTTTA |
| | (SEQ ID NO: 54) | (SEQ ID NO: 797) |
| 350 | Q8NCX8 | TTATGGTGGGTTTTTATT |
| | (SEQ ID NO: 54) | (SEQ ID NO: 798) |
| 351 | Q8NCX8 | TTCGGTTTATACGATTTTT |
| | (SEQ ID NO: 54) | (SEQ ID NO: 799) |
| 352 | Q8NCX8 | ATTTGGTTTATATGATTTTT |
| | (SEQ ID NO: 54) | (SEQ ID NO: 800) |
| 353 | Q8NCX8 | TTACGTCGATTATCGG |
| | (SEQ ID NO: 54) | (SEQ ID NO: 801) |
| 354 | Q8NCX8 | TATGTTGATTATTGGGGT |
| | (SEQ ID NO: 54) | (SEQ ID NO: 502) |
| 355 | SEQ ID NO: 55 | AATTTACGCGGGTGTT |
| | (SEQ ID NO: 55) | (SEQ ID NO: 803) |
| 356 | SEQ ID NO: 55 | GGAATTTATGTGGGTG |
| | (SEQ ID NO: 55) | (SEQ ID NO: 804) |
| 357 | SEQ ID NO: 55 | TAGTTCGTTTCGGTTA |
| | (SEQ ID NO: 55) | (SEQ ID NO: 805) |
| 358 | SEQ ID NO: 55 | AGTTTGTTTTGGTTAGT |
| | (SEQ ID NO: 55) | (SEQ ID NO: 806) |
| 359 | SEQ ID NO: 55 | GTCGTGTACGAATTCGT |
| | (SEQ ID NO: 55) | (SEQ ID NO: 807) |
| 360 | SEQ ID NO: 55 | GTTGTGTATGAATTTGTT |
| | (SEQ ID NO: 55) | (SEQ ID NO: 808) |
| 361 | SEQ ID NO: 55 | AGCGTTTAAGTCGCGG |
| | (SEQ ID NO: 55) | (SEQ ID NO: 809) |
| 362 | SEQ ID NO: 55 | TAGTGTTTAAGTTGTGG |
| | (SEQ ID NO: 55) | (SEQ ID NO: 810) |
| 363 | SNAPC2 | TTACGATTTCGGTGTT |
| | (SEQ ID NO: 56) | (SEQ ID NO: 811) |
| 364 | SNAPC2 | TAGAGTTATGATTTTGGT |
| | (SEQ ID NO: 56) | (SEQ ID NO: 812) |
| 385 | SNAPC2 | AGGCGTGCGTCGATAT |
| | (SEQ ID NO: 56) | (SEQ ID NO: 813) |
| 366 | SNAPC2 | AGGTGTGTGTTGATATT |
| | (SEQ ID NO: 56) | (SEQ ID NO: 814) |
| 367 | SNAPC2 | GTAGCGTCGAGGGTTT |
| | (SEQ ID NO: 56) | (SEQ ID NO: 815) |
| 368 | SNAPC2 | GTAGTGTTGAGGGTTT |
| | (SEQ ID NO: 56) | (SEQ ID NO: 816) |
| 369 | SNAPC2 | ATACGTTGACGTAGTT |
| | (SEQ ID NO: 56) | (SEQ ID NO: 817) |
| 370 | SNAPC2 | TTGTATATGTTGATGTAGT |
| | (SEQ ID NO: 56) | (SEQ ID NO: 818) |
| 371 | PTPRN2 | GACGTAGTTCGTACGT |
| | (SEQ ID NO: 57) | (SEQ ID NO: 819) |
| 372 | PTPRN2 | GGATGTAGTTTGTATGT |
| | (SEQ ID NO: 57) | (SEQ ID NO: 820) |
| 373 | PTPRN2 | TTAGTCGTTTCGAGAT |
| | (SEQ ID NO: 57) | (SEQ ID NO: 821) |
| 374 | PTPRN2 | GTTTTAGTTGTTTTGAGA |
| | (SEQ ID NO: 57) | (SEQ ID NO: 822) |
| 375 | PTPRN2 | TTACGCGTATCGGGAT |
| | (SEQ ID NO: 57) | (SEQ ID NO: 823) |
| 376 | PTPRN2 | TATGTGTATTGGGATTTA |
| | (SEQ ID NO: 57) | (SEQ ID NO: 824) |
| 377 | PTPRN2 | TTCGCGTTTCGTAAGA |
| | (SEQ ID NO: 57) | (SEQ ID NO: 825) |
| 378 | PTPRN2 | TTTGTGTTTTGTAAGATAT |
| | (SEQ ID NO: 57) | (SEQ ID NO: 826) |
| 379 | WDFY3 | TATTGAGTCGGTCGTA |
| | (SEQ ID NO: 58) | (SEQ ID NO. 827) |
| 380 | WDFY3 | ATTGAGTTGGTTGTAGA |
| | (SEQ ID NO: 58) | (SEQ ID NO: 828) |
| 381 | WDFY3 | TAGATAGCGTCGTTGG |
| | (SEQ ID NO: 58) | (SEQ ID NO: 829) |
| 382 | WDFY3 | TAGATAGTGTTGTTGGA |
| | (SEQ ID NO: 58) | (SEQ ID NO: 830) |
| 383 | ZNF566 | ATMAATACGACGTTGA |
| | (SEQ ID NO: 59) | (SEQ ID NO: 831) |
| 384 | ZNF566 | ATAAAATATGATGTTGAATT |
| | (SEQ ID NO: 59) | (SEQ ID NO: 832) |
| 385 | ZNF566 | AGCGTTTTTTACGAAT |
| | (SEQ ID NO: 59) | (SEQ ID NO: 833) |
| 386 | ZNF566 | TAGTGTTTTTTATGAATGA |
| | (SEQ ID NO: 59) | (SEQ ID NO: 834) |
| 387 | Q9NP73 | TATTACGGATTTTCGTT |
| | (SEQ ID NO: 60) | (SEQ ID NO: 835) |
| 388 | Q9NP73 | GTTATTATGGATTTTTGTT |
| | (SEQ ID NO: 60) | (SEQ ID NO: 836) |
| 389 | Q9NP73 | TGCGTTATATTCGGTT |
| | (SEQ ID NO: 60) | (SEQ ID NO: 837) |
| 390 | Q9NP73 | AGTTGTGTTATATTTGGT |
| | (SEQ ID NO: 60) | (SEQ ID NO: 838) |
| 391 | Q9NP73 | AATTCGCGTTATGAAG |
| | (SEQ ID NO: 60) | (SEQ ID NO: 839) |
| 392 | Q9NP73 | TTGAGGAATTTGTGTTAT |
| | (SEQ ID NO: 60) | (SEQ ID NO: 840) |
| 393 | Q9NP73 | GTCGGCGTTCGATAGT |
| | (SEQ ID NO: 60) | (SEQ ID NO: 841) |
| 394 | Q9NP73 | TGTTGGTGTTTGATAGT |
| | (SEQ ID NO: 60) | (SEQ ID NO: 842) |
| 395 | SEQ ID NO: 61 | AGAATTCGTAAACGGG |
| | (SEQ ID NO: 61) | (SEQ ID NO: 843) |
| 396 | SEQ ID NO: 61 | ATTTGTAAATGGGGGT |
| | (SEQ ID NO: 61) | (SEQ ID NO: 844) |
| 397 | SEQ ID NO: 61 | TTCGGTTATCGACGGT |
| | (SEQ ID NO: 61) | (SEQ ID NO: 845) |
| 398 | SEQ ID NO: 61 | TTTGGTTATTGATGGTT |
| | (SEQ ID NO: 61) | (SEQ ID NO: 846) |
| 399 | Q86SP6 | ATCGTGAGCGTAGCGT |
| | (SEQ ID NO: 62) | (SEQ ID NO: 847) |
| 400 | Q86SP6 | ATTGTGAGTGTAGTGTA |
| | (SEQ ID NO: 62) | (SEQ ID NO: 848) |
| 401 | Q86SP6 | TAGGCGTGAGAATCGG |
| | (SEQ ID NO: 62) | (SEQ ID NO: 849) |
| 402 | Q86SP6 | TAGGTGTGAGAATTGG |
| | (SEQ ID NO: 62) | (SEQ ID NO: 850) |
| 403 | Q86SP6 | ATCGTGTTCGGATCGG |
| | (SEQ ID NO: 62) | (SEQ ID NO: 851) |
| 404 | Q86SP6 | TATTGTGTTTGGATTGG |
| | (SEQ ID NO: 62) | (SEQ ID NO: 852) |
| 405 | Q86SP6 | AGGTTCGAGTTTGCGG |
| | (SEQ ID NO: 62) | (SEQ ID NO: 853) |
| 406 | Q865P6 | TAGGTTTGAGTTTGTGG |
| | (SEQ ID NO: 62) | (SEQ ID NO: 854) |
| 407 | Q56SP6 | TATAAAGCGCGAGTGT |
| | (SEQ ID NO: 62) | (SEQ ID NO: 855) |
| 408 | Q86SP6 | TATAAAGTGTGAGTGTG |
| | (SEQ ID NO: 62) | (SEQ ID NO: 856) |
| 409 | RARB | ATGTCGAGAACGCGAG |
| | (SEQ ID NO: 8) | (SEQ ID NO: 857) |
| 410 | RARB | GGATGTTGAGAATGTGA |
| | (SEQ ID NO: 8) | (SEQ ID NO: 858) |
| 411 | RARB | AGCGATTCGAGTAGGG |
| | (SEQ ID NO: 8) | (SEQ ID NO: 859) |
| 412 | RARB | AGTGATTTGAGTAGGG |
| | (SEQ ID NO: 8) | (SEQ ID NO: 860) |
| 413 | RARB | TATCGTCGGGGTAGGA |
| | (SEQ ID NO: 8) | (SEQ ID NO: 863) |
| 416 | RARB | GAATGTATTTGGAAGGT |
| | (SEQ ID NO: 8) | (SEQ ID NO: 864) |
| 417 | PTGS2 | AGCGTTTTCGAGAGTT |
| | (SEQ ID NO: 9) | (SEQ ID NO: 865) |
| 418 | PTGS2 | GAGTGTTTTTGAGAGTT |
| | (SEQ ID NO: 9) | (SEQ ID NO: 866) |
| 419 | PTGS2 | TTACGTCGGGATAGAT |
| | (SEQ ID NO: 9) | (SEQ ID NO: 867) |
| 420 | PTGS2 | GGAAGTTATGTTGGGA |
| | (SEQ ID NO: 9) | (SEQ ID NO: 868) |
| 421 | PTGS2 | TATCGTTTTAGGCGTA |
| | (SEQ ID NO: 9) | (SEQ ID NO: 869) |
| 422 | PTGS2 | TTTATTGTTTTAGGTGTAT |
| | (SEQ ID NO: 9) | (SEQ ID NO: 870) |
| 423 | RASSF1 | TACGGGTATTTTCGCGT |
| | (SEQ ID NO: 10) | (SEQ ID NO: 871) |
| 424 | RASSF1 | ATATGGGTATTTTTGTGT |
| | (SEQ ID NO: 10) | (SEQ ID NO: 872) |
| 425 | RASSF1 | AGAGCGCGTTTAGTTT |
| | (SEQ ID NO: 10) | (SEQ ID NO: 873) |
| 426 | RASSF1 | GAGAGTGTGTTTAGTTT |
| | (SEQ ID NO: 10) | (SEQ ID NO: 874) |
| 427 | ESR2 | TAGGAACGTTCGACGT |
| | (SEQ ID NO: 11) | (SEQ ID NO: 875) |
| 428 | ESR2 | TTTAGGAATGTTTGATGT |
| | (SEQ ID NO: 11) | (SEQ ID NO: 876) |
| 429 | ESR2 | ATGGCGTTTTTCGTAG |
| | (SEQ ID NO: 11) | (SEQ ID NO: 877) |
| 430 | ESR2 | TAGATGGTGTTTTTTGT |
| | (SEQ ID NO: 11) | (SEQ ID NO: 878) |
| 431 | ESR2 | ATAAGCGATTTAACGAT |
| | (SEQ ID NO: 11) | (SEQ ID NO: 879) |
| 432 | ESR2 | AGTGATTTAATGATAAGTT |
| | (SEQ ID NO: 11) | (SEQ ID NO: 880) |
| 433 | ESR2 | ATTTCGAGGATTACGT |
| | (SEQ ID NO: 11) | (SEQ ID NO: 881) |
| 434 | ESR2 | ATATTTTGAGGATTATGTT |
| | (SEQ ID NO: 11) | (SEQ ID NO: 882) |
| 435 | DRG1 | TAGTCGTTAAAACGTAG |
| | (SEQ ID NO: 12) | (SEQ ID NO: 883) |
| 436 | DRG1 | AGTTGTTAAAATGTAGATT |
| | (SEQ ID NO: 12) | (SEQ ID NO: 884) |
| 437 | DRG1 | ATCGTATTGGTTCGCGG |
| | (SEQ ID NO: 12) | (SEQ ID NO: 885) |
| 438 | DRG1 | ATTGTATTGGTTTGTGG |
| | (SEQ ID NO: 12) | (SEQ ID NO: 886) |
| 439 | DRG1 | TTTACGTTTTGCGATT |
| | (SEQ ID NO: 12) | (SEQ ID NO: 887) |
| 440 | DRG1 | AGTTTTATGTTTTGTGAT |
| | (SEQ ID NO: 12) | (SEQ ID NO: 888) |
| 441 | DRG1 | ATTTTTACGCGGAATT |
| | (SEQ ID NO: 12) | (SEQ ID NO: 889) |
| 442 | DRG1 | GTGATTTTTATGTGGAAT |
| | (SEQ ID NO: 12) | (SEQ ID NO: 890) |
| 443 | DRG1 | ATTCGAAGTATCGCGT |
| | (SEQ ID NO: 12) | (SEQ ID NO: 891) |
| 444 | DRG1 | ATTTGAAGTATTGTGTTT |
| | (SEQ ID NO: 12) | (SEQ ID NO: 892) |
| 445 | DRG1 | ATTTCGAATTTCGAGTA |
| | (SEQ ID NO: 12) | (SEQ ID NO: 893) |
| 446 | DRG1 | TTTGAATTTTGAGTAGAG |
| | (SEQ ID NO: 12) | (SEQ ID NO: 894) |
| 447 | DOCK10 | TATATTGTCGGGGAGA |
| | (SEQ ID NO: 16) | (SEQ ID NO: 895) |
| 448 | DOCK10 | ATATTGTTGGGGAGAG |
| | (SEQ ID NO: 16) | (SEQ ID NO: 896) |
| 449 | BTG4 | GTGTTGCGTAGAGATA |
| | (SEQ ID NO: 17) | (SEQ ID NO: 897) |
| 450 | BTG4 | GGTGTTGTGTAGAGAT |
| | (SEQ ID NO: 17) | (SEQ ID NO: 898) |
| 451 | BTG4 | TTGGTTTTTCGGAATAA |
| | (SEQ ID NO: 17) | (SEQ ID NO: 899) |
| 452 | BTG4 | GGTTTTTTGGAATAAGAT |
| | (SEQ ID NO: 17) | (SEQ ID NO: 900) |
| 453 | GPR7 | ATTGAGGGCGTATAGA |
| | (SEQ ID NO: 19) | (SEQ ID NO: 901) |
| 454 | GPR7 | TGAGGGTGTATAGATTT |
| | (SEQ ID NO: 19) | (SEQ ID NO: 902) |
| 455 | GPR7 | GGAGATCGAAGTTTGT |
| | (SEQ ID NO: 19) | (SEQ ID NO: 903) |
| 456 | GPR7 | GGGGAGATTGAAGTTT |
| | (SEQ ID NO: 19) | (SEQ ID NO: 904) |
| 457 | ISLA | AGATTTTGCGAAAGATA |
| | (SEQ ID NO: 21) | (SEQ ID NO: 905) |
| 458 | ISL1 | TTAGATTTTGTGAAAGATA |
| | (SEQ ID NO: 21) | (SEQ ID NO: 906) |
| 459 | ISL1 | AAGATATCGAAATTAAGTT |
| | (SEQ ID NO: 21) | (SEQ ID NO: 907) |
| 460 | ISL1 | AAGATATTGAAATTAAGTTT |
| | (SEQ ID NO: 21) | (SEQ ID NO: 908) |
| 461 | GPRK5 | AGATTTTCGAGGGAGA |
| | (SEQ ID NO: 22) | (SEQ ID NO: 909) |
| 462 | GPRK5 | AGATTTTTGAGGGAGAT |
| | (SEQ ID NO: 22) | (SEQ ID NO: 910) |
| 463 | FBN2 | AATTGGTCGTTAGTTTT |
| | (SEQ ID NO: 28) | (SEQ ID NO: 911) |
| 464 | FBN2 | GTTAATTGGTTGTTAGTT |
| | (SEQ ID NO: 28) | (SEQ ID NO: 912) |
| 465 | FBN2 | TTAGGGATCGGATTTG |
| | (SEQ ID NO: 28) | (SEQ ID NO: 913) |
| 466 | FBN2 | ATTAGGGATTGGATTTG |
| | (SEQ ID NO: 28) | (SEQ ID NO: 914) |
| 467 | LIMK1 | TTTAATTCGAAAGGGAA |
| | (SEQ ID NO: 30) | (SEQ ID NO: 915) |
| 468 | LIMK1 | TTAATTTGAAAGGGAAAG |
| | (SEQ ID NO: 30) | (SEQ ID NO: 916) |
| 469 | PSD/Q9H469 | AGGTTAGTCGAGAAGT |
| | (SEQ ID NO: 31) | (SEQ ID NO: 917) |
| 470 | PSD/Q9H469 | AGGTTAGTTGAGAAGTA |
| | (SEQ ID NO: 31) | (SEQ ID NO: 918) |
| 471 | PSD/Q9H469 | ATTGTTACGAAGTGGA |
| | (SEQ ID NO: 31) | (SEQ ID NO: 919) |
| 472 | PSD/Q9H469 | TTGTTATGAAGTGGAAG |
| | (SEQ ID NO: 31) | (SEQ ID NO: 920) |
| 473 | Q96S01 | TATTGATCGGTTGGAG |
| | (SEQ ID NO: 34) | (SEQ ID NO: 921) |
| 474 | Q96S01 | TATTGATTGGTTGGAGG |
| | (SEQ ID NO: 34) | (SEQ ID NO: 922) |
| 475 | ABHD9 | AGTTAGAGCGTATTATTT |
| | (SEQ ID NO: 37) | (SEQ ID NO: 923) |
| 476 | ABHD9 | AATAGTTAGAGTGTATTATT |
| | (SEQ ID NO: 37) | (SEQ ID NO: 924) |
| 477 | MLLT3 | TTAGTGGTCGGAGATA |
| | (SEQ ID NO: 42) | (SEQ ID NO: 925) |
| 478 | MLLT3 | AGTGGTTGGAGATAGA |
| | (SEQ ID NO: 42) | (SEQ ID NO: 926) |
| 479 | SOLH | TATATTTCGTGAGGGTA |
| | (SEQ ID NO: 43) | (SEQ ID NO: 927) |
| 480 | SOLH | TATATTTTGTGAGGGTAG |
| | (SEQ ID NO: 43) | (SEQ ID NO: 928) |
| 481 | Q9NWV0 | ATTTTTACGAGAAGGTT |
| | (SEQ ID NO: 46) | (SEQ ID NO: 929) |
| 482 | Q9NWV0 | GATTTTTATGAGAAGGTT |
| | (SEQ ID NO: 46) | (SEQ ID NO: 930) |
| 483 | H2AFY2 | ATGGGAATCGTGGTTT |
| | (SEQ ID NO: 48) | (SEQ ID NO: 931) |
| 484 | H2AFY2 | ATGGGAATTGTGGTTT |
| | (SEQ ID NO: 48) | (SEQ ID NO: 932) |
| 485 | RHOC | AGGTTTACGGAAAAGG |
| | (SEQ ID NO: 49) | (SEQ ID NO: 933) |
| 486 | RHOC | AAGGTTTATGGAAAAGG |
| | (SEQ ID NO. 49) | (SEQ ID NO: 934) |
| 487 | KBTBD6 | TAGAGTCGGGTTTTGTA |
| | (SEQ ID NO: 51) | (SEQ ID NO: 935) |
| 488 | KBTBD6 | TAGAGTTGGGTTTTGTA |
| | (SEQ ID NO: 51) | (SEQ ID NO: 936) |
| 489 | TRPM4 | ATGGGGGTCGAGATTT |
| | (SEQ ID NO: 52) | (SEQ ID NO: 937) |
| 490 | TRPM4 | ATGGGGGTTGAGATTT |
| | (SEQ ID NO: 52) | (SEQ ID NO: 938) |
| 491 | TCEB3BP1 | GGTAGTCGGTATTAGG |
| | (SEQ ID NO: 53) | (SEQ ID NO: 939) |
| 492 | TCEB3BP1 | TGGTAGTTGGTATTAGG |
| | (SEQ ID NO: 53) | (SEQ ID NO: 940) |
| 493 | TCEB3BP1 | TGTAGTCGAAGGTTAG |
| | (SEQ ID NO: 53) | (SEQ ID NO: 941) |
| 494 | TCEB3BP1 | TGTAGTTGAAGGTTAGT |
| | (SEQ ID NO: 53) | (SEQ ID NO: 942) |
| 495 | Q8NCX8 | GGAGTTTATTCGGTTTAT |
| | (SEQ ID NO: 54) | (SEQ ID NO: 943) |
| 496 | QBNCX8 | GGAGTTTATTTGGTTTATA |
| | (SEQ ID NO: 54) | (SEQ ID NO: 944) |
| 497 | WDFY3 | AATTGTAGTCGTTTAGTT |
| | (SEQ ID NO: 58) | (SEQ ID NO: 945) |
| 498 | WDFY3 | AAATTGTAGTTGTTAGTT |
| | (SEQ ID NO: 58) | (SEQ ID NO: 946) |
| 499 | ZNF566 | TATTTTTTCGGTAGAGAT |
| | (SEQ ID NO: 59) | (SEQ ID NO: 947) |
| 500 | ZNF566 | TTTTTTTGGTAGAGATTG |
| | (SEQ ID NO: 59) | (SEQ ID NO: 948) |
| 501 | ZNF566 | ATGGGTTGCGTTTATA |
| | (SEQ ID NO: 59) | (SEQ ID NO: 949) |
| 502 | ZNF566 | TGGGTTGTGTTTATAAG |
| | (SEQ ID NO: 59) | (SEQ ID NO: 950) |
| 503 | SEQ ID NO: 61 | TTTAGGGCGAGGTTAT |
| | (SEQ ID NO: 61) | (SEQ ID NO: 951) |
| 504 | SEQ ID NO: 61 | TTTAGGGTGAGGTTATT |
| | (SEQ ID NO: 61) | (SEQ ID NO: 952) |
| 505 | SEQ ID NO: 61 | TGTATATTTCGTAGGGT |
| | (SEQ ID NO: 61) | (SEQ ID NO: 953) |
| 506 | SEQ ID NO: 61 | TTGTATATTTTGTAGGGT |
| | (SEQ ID NO: 61) | (SEQ ID NO: 954) |
| 507 | PTGS2 | ATTTGAGCGGTTTTGA |
| | (SEQ ID NO: 9) | (SEQ ID NO: 955) |
| 508 | PTGS2 | AATTTGAGTGGTTTTGA |
| | (SEQ ID NO: 9) | (SEQ ID NO: 956) |
| 509 | RASSF1 | AGTAAATCGGATTAGGA |
| | (SEQ ID NO: 10) | (SEQ ID NO: 957) |
| 510 | RASSF1 | AGTAAATTGGATTAGGAG |
| | (SEQ ID NO: 10) | (SEQ ID NO: 958) |
| 511 | DRG1 | TGTATGAACGTGTAGTT |
| | (SEQ ID NO: 12) | (SEQ ID NO: 959) |
| 512 | DRG1 | GTGTATGAATGTGTAGT |
| | (SEQ ID NO: 12) | (SEQ ID NO: 960) |

TABLE 11
Genes and sequences according to sequence listing.

| | | | | | | |
|---|---|---|---|---|---|---|
| | | | Sense | Antisense | Sense | Antisense |
| Gene (HUGO or | | | methylated | methylated | unmethylated | unmethylated |
| SPTREMBL ID or | | Genommic | converted | converted | converted | converted |
| EST Gene ID) | Ref.-Seq. | SEQ ID NO: | SEQ ID NO: | SEQ ID NO: | SEQ ID NO: | SEQ ID NO: |

| | | | | | | |
|---|---|---|---|---|---|---|
| CCND2 | NM_001759 | 1 | 65 | 66 | 193 | 194 |
| CDRN2A | NM_000077 | 2 | 67 | 68 | 195 | 196 |
| CD44 | NM_000610 | 3 | 69 | 70 | 197 | 198 |
| EDNRB1 | NM_000115 | 4 | 71 | 72 | 199 | 200 |
| ELK1 | NM_005229 | 5 | 73 | 74 | 201 | 202 |
| FOS | NM_005252 | 6 | 75 | 76 | 203 | 204 |
| GSTP1 | NM_000852 | 7 | 77 | 78 | 205 | 206 |
| RARB | NM_000965 | 8 | 79 | 80 | 207 | 208 |
| PTGS2 | NM_000963 | 9 | 81 | 82 | 209 | 210 |
| RASSF1 | NM_170715 | 10 | 83 | 84 | 211 | 212 |
| ESR2 | NM_001437 | 11 | 85 | 86 | 213 | 214 |
| DRG1 | NM_004147 | 12 | 87 | 88 | 215 | 216 |
| CMYA3 | | 13 | 89 | 90 | 217 | 218 |
| ONECUT2 | NM_004852 | 14 | 91 | 92 | 219 | 220 |
| MX1 | NM_002462 | 15 | 93 | 94 | 221 | 222 |
| DOCK10 | | 16 | 95 | 96 | 223 | 224 |
| BTG4 | NM_017589 | 17 | 97 | 98 | 225 | 226 |
| DMRTC2 | NM_033052 | 18 | 99 | 100 | 227 | 228 |
| GPR7 | NM_005285 | 19 | 101 | 102 | 229 | 230 |
| FAT | NM_005245 | 20 | 103 | 104 | 231 | 232 |
| ISL1 | NM_002202 | 21 | 105 | 106 | 233 | 234 |
| GPRK5 | NM_005308 | 22 | 107 | 108 | 235 | 236 |
| SLC35F2 | NM_017515 | 23 | 109 | 110 | 237 | 238 |
| C14orf59 | NM_174976 | 24 | 111 | 112 | 239 | 240 |
| SNRPN | NM_003097 | 25 | 113 | 114 | 241 | 242 |
| ARHGEF18 | NM_015318 | 26 | 115 | 116 | 243 | 244 |
| SNX8 | NM_013321 | 27 | 117 | 118 | 245 | 246 |
| FBN2 | NM_001999 | 28 | 119 | 120 | 247 | 248 |
| HOXB5 | NM_002147 | 29 | 121 | 122 | 249 | 250 |
| LIMK1 | NM_002314 | 30 | 123 | 124 | 251 | 252 |
| PSD; Q9H469 | NM_002779; | 31 | 125 | 126 | 253 | 254 |
| | NM_024326 | | | | | |
| SLC38A1 | NM_030674 | 32 | 127 | 128 | 255 | 256 |
| HIST1H4J | NM_003495 | 33 | 129 | 130 | 257 | 258 |
| Q96501 | Not | 34 | 131 | 132 | 259 | 260 |
| | applicable | | | | | |
| Genomic region | NM_023067 | 35 | 133 | 134 | 261 | 262 |
| downstream of FOXL2 | | | | | | |
| ORC4L | NM_002552 | 36 | 135 | 136 | 263 | 264 |
| ABHD9 | NM_024794 | 37 | 137 | 138 | 265 | 266 |
| CD37 | NM_001774 | 38 | 139 | 140 | 267 | 268 |
| GRN | NM_002087 | 39 | 141 | 142 | 269 | 270 |
| EPAS1 | NM_001430 | 40 | 143 | 144 | 271 | 272 |
| NOTCH1 | NM_017617 | 41 | 145 | 146 | 273 | 274 |
| MLLT3 | NM_004529 | 42 | 147 | 148 | 275 | 276 |
| SOLH | NM_005632 | 43 | 149 | 150 | 277 | 278 |
| ENSESTG00002636932 | Not | 44 | 151 | 152 | 279 | 280 |
| | applicable | | | | | |
| Q8N365 | NM_144697 | 45 | 153 | 154 | 281 | 282 |
| Q9NWV0 | NM_017891 | 46 | 155 | 156 | 283 | 284 |
| ENST00000339569 | Not | 47 | 157 | 158 | 285 | 286 |
| | applicable | | | | | |
| H2AFY2 | NM_018649 | 48 | 159 | 160 | 287 | 288 |
| RHOC | NM_005167 | 49 | 161 | 162 | 289 | 290 |
| NR2E1 | NM_003269 | 50 | 163 | 164 | 291 | 292 |
| KBTBD6 | NM_152903 | 51 | 165 | 166 | 293 | 294 |
| TRPM4 | NM_017636 | 52 | 167 | 168 | 295 | 296 |
| TCEB3BP1 | NM_020695 | 53 | 169 | 170 | 297 | 298 |
| Q8NCX8 | NM_178564 | 54 | 171 | 172 | 299 | 300 |
| Genomic sequence | Genomic | 55 | 173 | 174 | 301 | 302 |
| | sequence | | | | | |
| SNAPC2 | NM_003083 | 56 | 175 | 176 | 303 | 304 |
| PTPRN2 | NM_002847 | 57 | 177 | 178 | 305 | 306 |
| DFY3 | NM_014991 | 58 | 179 | 180 | 307 | 308 |
| NF566 | NM_032838 | 59 | 181 | 182 | 309 | 310 |
| Q9NP73 | NM_018466 | 60 | 183 | 184 | 311 | 312 |
| | NM_173660 | 61 | 185 | 186 | 313 | 314 |
| Q86SP6 | Not | 62 | 187 | 188 | 315 | 316 |
| | applicable | | | | | |
| HIST2H2BF regulatory | NM_003529 | 63 | 189 | 190 | 317 | 318 |
| region | | | | | | |
| PMF1 | NM_000711 | 64 | 191 | 192 | 319 | 320 |
| PITX2 | NM_000325 | 961 | 962 | 963 | 964 | 965 |

TABLE 12
Primers and Probes for MSP-MethyLight™ Assays.

| | | |
|---|---|---|
| Forward | Reverse | Probe |

| | | | |
|---|---|---|---|
| SEQ ID NO: 19 | tgcggattttggcgaattc | aaaaacccgccgactacgaa | aactaaaacgcctaccgactaaata |
| | | | tccgcct |
| SEQ ID NO: 35 | gagttttcgcggttcgga | cgcgaccgctaaactcg | cgaccaaatccgaacccgtacatcg |
| SEQ ID NO: 37 | cggtatgtcgtcgcgtttc | ctaacaccgcttcgccg | cctaaccgacaacgccgccgtaat |
| SEQ ID NO: 7 | agttgcgcggcgatttc | gccccaatactaaatcacgac | cggtcgacgttcggggtgtagcg |
| | | g | |
| SEQ ID NO: 63 | atggcgtataggttcgtgttttc | cttccaacgactaatacgcga | cgcttccaaaactcgaccgtaataa |
| | | a | cgc |
| SEQ ID NO: 8 | atataaactaaaaaacgaaacgataaacga | ttttacgtttttttatttgcg | cgaacgaacgcaaacgaaacaccg |
| | | gc | |
| SEQ ID NO: 64 | ccactaactccgtaccgtacgtat | ggttagcgagtcgatcggtt | acgttctcgtctccgctaaattatc |
| | | | cgc |
| SEQ ID NO: 43 | tcgtttttttagtcgtttgggtc | tatcgaaaccccgaaccg | caccgtcgcctcccacgaca |
| SEQ ID NO: 40 | ttttcgttttttttcggtogtt | gaccgcgcaaaaaactcg | cgctcgaataacgccgaacccg |
| SEQ ID NO: 32 | ctcgcacaaaaacgaaaatacg | agttcgcgtttttaaacgtt | ccgacaccgacccacgcgt |
| | | gtc | |
| SEQ ID NO: 37 | cggtatgtcgtcgcgtttc | ctaacaccgcttcgccg | cctaaccgacaacgccgccgtaat |
| SEQ ID NO: 9 | aaacgaaaactctacccgaatacg | cgcggttttggcgttt | ccgaaatccccgatacgcgacg |
| SEQ ID NO: 19 | tgcggattttggcgaattc | aaaaacccgccgactacgaa | aactaaaacgcctaccgactaaata |
| | | | tccgcct |
| SEQ ID NO: 34 | gtatttatttggtaatttcgtattataatt | gactaaaaacgcgaaatccga | acgatccgatctaaaaaccgactct |
| | cgag | | tcgaa |
| SEQ ID NO: 35 | gagttttcgcggttcgga | cgcgaccgctaaactcg | cgaccaaatccgaacccgtacatcg |

TABLE 13
Components for all QM assays according to Example 5

| Component | Company | Stock conc. | |
|---|---|---|---|
| Reaction buffer ROX | Eurogentec | 10x | |
| MgCl2 | Eurogentec | 50 | mM |
| DNTPs | MBI | 25 | mM each |
| Forward primer | TIB Molbiol | 6.25 | μM |
| Reverse primer | TIB Molbiol | 6.25 | μM |
| cg Probe | Eurogentec | 4 | μM |
| tg Probe | Eurogentec | 4 | μM |
| HotGoldStar-Taq | Eurogentec | 5 | U/μl |
| Water | Fluka | | |

TABLE 14
Optimized Reaction conditions for all QM assays according to Example 5

| Gene | dNTPs | Buffer | MgCl₂ | Primers | Probes | Taq | Baseline | Threshold | Annealing |
|---|---|---|---|---|---|---|---|---|---|
| PITX2 | 250 μM | 1 x | 3 mM | 625 nM | 200 nM | 1U | 3/23 | 0.05 | 62° C. |
| Chr3-EST | 200 μM | 1 x | 3.5 mM | 625 nM | 200 nM | 1U | 6/22 | 0.05 | 60° C. |
| ABHD9 | 200 μM | 1 x | 25 mM | 625 nM | 200 nM | 1U | 6/25 | 0.08 | 60° C. |
| GPR7 | 250 μM | 1 x | 3 mM | 625 nM | 150 nM | 1U | 6/24 | 0.05 | 60° C. |
| HIST 2H2BF | 250 μM | 1 x | 3 mM | 625 nM | 250 nM | 1U | 3/22 | 0.05 | 60° C. |
| CCND2 | 250 μM | 1 x | 3 mM | 625 nM | 250 nM | 1U | 3/22 | 0.08 | 60° C. |

TABLE 15
Cycle program for QM assays according to Example 5.

| | T [° C.] | t | Cycles |
|---|---|---|---|
| Initial denat. | 95.0 | 10 min | |
| Denaturation | 55.0 | 15 sec | 45x (PITX2 |
| Annealing | Variable | 60 sec | 50x) |

For annealing temperatures see Table 14.

TABLE 16
Clinical characteristics of the patient
population according to Example 5.

| | | Clinical Variable | | | |
|---|---|---|---|---|---|
| | | Baylor | Stanford | VMMC | Total |
| | | Age (mean) | | | |
| | | 61.1 | 61.7 | 61.1 | 61.3 |
| PSA | 0-4 | 25 | 33 | 18 | 76 |
| | 4-10 | 120 | 139 | 99 | 358 |
| | >10 | 60 | 72 | 30 | 162 |
| Gleason Score | 5-6 | 137 | 164 | 118 | 419 |
| | 7 | 37 | 44 | 19 | 100 |
| | 8-10 | 26 | 31 | 25 | 82 |
| Stage | Organ- | 110 | 211 | 113 | 434 |
| | confined | | | | |
| | Not organ- | 94 | 33 | 35 | 162 |
| | confined | | | | |

| | | | | |
|---|---|---|---|---|
| PSA-based recurrence | 22 | 10 | 13 | 45 |
| Decision to treat based | 3 | 14 | 4 | 21 |
| recurrence | | | | |
| Total Samples | 206 | 244 | 162 | 612 |

Age is given as the mean, and all other variables are given as the number of patients. Not all information was available for all patients.

TABLE 17
Performance of the six markers according to Example
5 using the median methylation level as a cut-off.

| | | Events in | Events in | |
|---|---|---|---|---|
| | P | hypomethyl- | hypermethyl- | AUC |
| | value | ated group | ated group | (5 years) |
| PITX2 | 0.000017 | 15 | 49 | 0.64 |
| GPR7 | 0.0016 | 20 | 45 | 0.64 |
| HIST2H2BF | 0.018 | 22 | 43 | 0.60 |
| regulatory | | | | |
| region | | | | |
| SEQ ID | 0.0059 | 21 | 44 | 0.61 |
| NO: 35 | | | | |
| ABHD9 | 0.018 | 22 | 43 | 0.58 |
| CCND2 | 0.22 | 27 | 38 | 0.61 |

TABLE 18
Results of the Cox regression analysis
for PITX2 according to Example 5.

| | | | Lower | Upper |
|---|---|---|---|---|
| | P | Hazard | Confidence | Confidence |
| Variable | value | Ratio | Interval | Interval |
| PITX2 | 0.0043 | 2.222 | 1.284 | 3.845 |
| Disease stage | 0.0692 | 1.713 | 0.965 | 3.061 |
| Gleason | 0.0107 | 1.798 | 1.146 | 2.821 |
| category | | | | |
| PSA | 0.075 | 1.254 | 0.977 | 1.609 |
| Nomogram | 0.0866 | 2.187 | 0.894 | 5.353 |
| category | | | | |

Using stepwise regression the marker remains in the model. P-values refer to the null-hypothesis “hazard ratio equals zero”.

TABLE 19
Results of the Cox regression analysis for
SEQ ID NO: 63 according to Example 5.

| | | | Lower | Upper |
|---|---|---|---|---|
| | P | Hazard | Confidence | Confidence |
| Variable | value | Ratio | Interval | Interval |
| SEQ ID NO: 63 | 0.0239 | 2.918 | 1.152 | 7.393 |
| Disease stage | 0.0599 | 1.735 | 0.977 | 3.081 |
| Gleason | 0.0106 | 1.799 | 1.146 | 2.822 |
| category | | | | |
| PSA | 0.0732 | 1.25 | 0.979 | 1.596 |
| Nomogram | 0.0384 | 2.526 | 1.051 | 6.071 |
| category | | | | |

The marker remains in the model.

TABLE 20

Primer and probe sequences of
assays according to Example 5.

| | | | |
|---|---|---|---|
| Primers + Probes | Sequence | Label 5′ | Label 3′ |

| | | | |
|---|---|---|---|
| CCND2 | | | |
| Forward primer | Tttttgtaaagatagttttgatttaagtat | | |
| | (SEQ ID NO: 983) | | |
| Reverse primer | caaactttctccctaaaaacc | | |
| | (SEQ ID NO: 984) | | |
| CG-probe | Cgccgccaacacgatcg | FAM | BHQ1 |
| | (SEQ ID NO: 985) | | |
| G-probe | Caccaccaacacaatcaaccctaacac | HEX | BHQ1 |
| | (SEQ ID NO: 986) | | |
| SEQ ID NO: 63 | | | |
| Forward primer | tgattattatgtttaaggatatttagttg | | |
| | (SEQ ID NO: 987) | | |
| Reverse primer | caataactctaaaaaaaacctttaaatc | | |
| | (SEQ ID NO: 988) | | |
| CG-probe | Cgctccccgcgaatacgacg | FAM | BHQ1 |
| | (SEQ ID NO: 989) | | |
| TG-probe | Taaacccactccccacaaatacaacaaac | HEX | BHQ1 |
| | (SEQ ID NO: 990) | | |
| GRP7 | | | |
| Forward primer | Catccctacacttccaaac | | |
| | (SEQ ID NO: 991) | | |
| Reverse primer | Ggagttgttaggagaaaagtt | | |
| | (SEQ ID NO: 992) | | |
| CG-probe | Cgaacacccaaccgacaaacg | FAM | BHQ1 |
| | (SEQ ID NO: 993) | | |
| TG-probe | Caaacacccaaccaacaaacatctca | HEX | BHQ1 |
| | (SEQ ID NO: 994) | | |
| Chr3_EST | | | |
| Forward primer | ttgtagggtttttttgggtt | | |
| | (SEQ ID NO: 995) | | |
| Reverse primer | Ctcaaaacccttaaaaacataaa | | |
| | (SEQ ID NO: 996) | | |
| CG-probe | Ataaccacactacgcgcctcc | FAM | BHQ1 |
| | (SEQ ID NO: 997) | | |
| TG-probe | taaccacactacacacctcccaca | Yakima | BHQ1 |
| | (SEQ ID NO: 998) | Yellow | |
| ABHD9 | | | |
| Forward primer | Ggtgttagggtttaggggtt | | |
| | (SEQ ID NO: 999) | | |
| Reverse primer | Ccaaatatttacctaacactcaaata | | |
| | (SEQ ID NO: 1000) | | |
| CG-probe | Aactattttctatcgaaaccgcccg | FAM | BHQ1 |
| | (SEQ ID NO: 1001) | | |
| TG-probe | Aactattttctatcaaaaccacccacctct | Yakima | BHQ1 |
| | (SEQ ID NO: 1002) | Yellow | |
| PITX2 | | | |
| Forward primer | Gtaggggagggaagtagatgtt | | |
| | (SEQ ID NO: 1003) | | |
| Reverse primer | Ttctaatcctcctttccacaataa | | |
| | (SEQ ID NO: 1004) | | |
| CG-probe | Agtcggagtcgggagagcga | FAM | TAMRA |
| | (SEQ ID NO: 1005) | | |
| TG-probe | Agttggagttgggagagtgaaaggaga | VIC | TAMRA |
| | (SEQ ID NO: 1006) | | |
| CCND2 | | | |
| Forward primer | tttttgtaaagatagttttgatttaagtat | | |
| Reverse primer | caaactttctccctaaaaacc | | |
| CG-probe | cgccgccaacacgatcg | FAM | BHQ1 |
| TG-probe | caccaccaacacaatcaaccctaacac | HEX | BHQ1 |
| SEQ ID NO: 63 | | | |
| Forward primer | tgattattatgtttaaggatatttagttg | | |
| Reverse primer | caataactctaaaaaaaacctttaaatc | | |
| CG-probe | cgctccccgcgaatacgacg | FAM | BHQ1 |
| TG-probe | taaacccactccccacaaatacaacaaac | HEX | BHQ1 |
| GRP7 | | | |
| Forward primer | catccctacacttccaaac | | |
| Reverse primer | ggagttgttaggagaaaagtt | | |
| CG-probe | cgaacacccaaccgacaaacg | FAM | BHQ1 |
| TG-probe | caaacacccaaccaacaaacatctca | HEX | BHQ1 |
| Chr3_EST | | | |
| Forward primer | ttgtagggtttttttgggtt | | |
| Reverse primer | ctcaaaacccttaaaaacataaa | | |
| CG-probe | ataaccacactacgcgcctcc | FAM | BHQ1 |
| TG-probe | ataaccacactacacacctcccaca | Yakima | BHQ1 |
| | | Yellow | |
| ABHD9 | | | |
| Forward primer | ggtgttagggtttaggggtt | | |
| Reverse primer | ccaaatatttacctaacactcaaata | | |
| CG-probe | aactattttctatcgaaaccgcccg | FAM | BHQ1 |
| TG-probe | aactattttctatcaaaaccacccacctct | Yakima | BHQ1 |
| | | Yellow | |
| PITX2 | | | |
| Forward primer | gtaggggagggaagtagatgtt | | |
| Reverse primer | ttctaatcctcctttccacaataa | | |
| CG-probe | agtcggagtcgggagagcga | FAM | AMRA |
| TG-probe | agttggagttgggagagtgaaaggaga | VIC | TAMRA |

TABLE 21

| | | | | | |
|---|---|---|---|---|---|
| SEQ ID NO | Classification | Tissue Type | AUC | Sensitivity | Specificity |

| | | | | | |
|---|---|---|---|---|---|
| 19 | Recurrance | Frozen & PET | 0.62 | 0.35 | 0.86 |
| 63 | Recurrance | Frozen & PET | 0.68 | 0.34 | 0.85 |
| 35 | Recurrance | Frozen & PET | 0.6 | 0.27 | 0.85 |
| 37 | Recurrance | Frozen & PET | 0.61 | 0.18 | 0.85 |
| 19 | Recurrance | PET | 0.58 | 0.5 | 0.88 |
| 63 | Recurrance | PET | 0.63 | 0.17 | 0.89 |
| 35 | Recurrance | PET | 0.69 | 0.33 | 0.89 |
| 37 | Recurrance | PET | 0.69 | 0.17 | 0.89 |
| 19 | Recurrance | Frozen | 0.62 | 0.34 | 0.86 |
| 63 | Recurrance | Frozen | 0.68 | 0.31 | 0.86 |
| 35 | Recurrance | Frozen | 0.6 | 0.28 | 0.85 |
| 37 | Recurrance | Frozen | 0.6 | 0.2 | 0.85 |
| 19 | Gleason | Frozen & PET | 0.72 | 0.49 | 0.86 |
| 63 | Gleason | Frozen & PET | 0.73 | 0.39 | 0.86 |
| 35 | Gleason | Frozen & PET | 0.62 | 0.21 | 0.86 |
| 37 | Gleason | Frozen & PET | 0.76 | 0.48 | 0.86 |
| 19 | Gleason | PET | 0.72 | 0.36 | 0.89 |
| 63 | Gleason | PET | 0.7 | 0.38 | 0.86 |
| 35 | Gleason | PET | 0.56 | 0.12 | 0.86 |
| 37 | Gleason | PET | 0.77 | 0.5 | 0.86 |
| 19 | Gleason | Frozen | 0.74 | 0.56 | 0.87 |
| 63 | Gleason | Frozen | 0.76 | 0.58 | 0.86 |
| 35 | Gleason | Frozen. | 0.65 | 0.28 | 0.87 |
| 37 | Gleason | Frozen | 0.77 | 0.47 | 0.87 |

### EXAMPLES

### Investigation Overview

[0380] The objective of the present investigation is to develop genetic markers that can identify prostate cancer patients that have aggressive tumors with metastatic potential. It was decided to use methylation analysis to identify differentially expressed genomic markers.

[0381] The investigation started with a genome-wide screening step to discover novel markers. This approach utilizes molecular biology methods for the determination of differential methylation between predefined groups of patient samples. Differentially methylated sequences identified using said genomic screening methods are herein referred to as Methylation Sequence Tags (also referred to as MeSTs). The genome-wide screening step identifies differentially methylated CpG sites. Additional information concerning the area surrounding the identified CpG site is obtained by BLAST analysis of the sequence found in the screening step (MeST or Methylation Sequence Tag) and mapping to the human genome.

[0382] Following identification of candidates by genome-wide screening, MSP MethyLight™ assays were developed for a subset of the promising candidates. These assays were used to analyze methylation in 56 prostatectomy samples with clinical outcome information. MSP MethyLight™ assays are sensitive and quantitative and they rely on CpG co-methylation; therefore, this assay format provides complementary data to DNA array technology.

[0383] All of the promising MeST candidates and some additional candidates were then analyzed by methylation oligonucleotide array using the applicant's proprietary chip technology as described in further detail below. This process provides information concerning the preliminary performance of the MeSTs or candidate genes if an appropriate sample set is used. Candidate markers will be selected based on data obtained from the chip data analysis. Selection is mainly based on the AUC of the marker in the discrimination between the desired classes.

[0384] To complete the development process, the candidate markers selected for assay development from the chip study were tested in real-time PCR assays for further validation on the target population and on the sample material used for a potential diagnostic or prognostic test (paraffin embedded tissues).

### Example 1

### MeST Screening

### Experimental Design

[0385] Pooled genomic DNA from prostate cancer samples was used for genome-wide screening of markers associated with tumor aggressiveness. Two different methods were applied: Methylation Specific-Arbitrarily Primed Polymerase Chain Reaction (MS-APPCR) (Liang et al., 1998) and Methylated CpG Island Amplification (MCA) (Toyota et al., 1999). These technologies distinguish between methylated and unmethylated CpG sites through the use of methylation sensitive enzymes n general, genomic DNA is cut with a methylation sensitive restriction enzyme. Methylated fragments are preferentially amplified because cleavage at unmethylated sites prevents amplification of the unmethylated targets. Methylated sequence tag (MeST) fragments obtained using these techniques are sequenced and mapped to the human genome using the BLAST utility in the Ensembl database (www.ensembl.org).

[0386] The primary definition of tumor aggressiveness for the screening phase was based on PSA recurrence after radical prostatectomy. An aggressive tumor was defined as one that recurred in less than 24 months. A non-aggressive tumor was defined as one that did not recur after at least 48 months of follow up with regular PSA testing. Five samples in each category were pooled, and there were three pools for each category. The median time to PSA recurrence for the patients with aggressive tumors was 5.1 months. The median follow up time for patients without recurrence was 60.3 months. None of these patients received neo-adjuvant or adjuvant therapies before PSA relapse.

[0387] We also included four other comparisons with alternative indicators of aggressiveness. Samples with Gleason grades four and five were compared to samples with Gleason grades one, two, and three. Late stage tumors (III and IV) were compared to early stage tumors (I and II). Peripheral zone tumors were compared to transition zone tumors. Lastly, normal tissues adjacent to tumors in patients with early PSA recurrence (<2 years) were compared to normal tissues adjacent to tumors in patients with no PSA recurrence (>4 years follow up).

[0388] Screening

[0389] The MeST screening process usually results in a large number of sequences that represent potential markers. Some of them are redundant or cannot be matched to the genome. The remaining sequences are selected using a scoring procedure assessing:

[0390] Appearance using multiple methods

[0391] Appearance in multiple pool comparisons of the same type

[0392] Location in CpG island

[0393] Location in promoter region

[0394] Location near or within gene sequence

[0395] Association of nearby gene with cancer

[0396] Class of gene (transcription factor, growth factor, etc.)

[0397] Repetitive element (negative score)

[0398] In this scoring scheme, a MeST sequence receives one point for each of the positive criteria (first seven criteria), and receives a score of minus 8 for having repetitive-sequence content greater than 50% (negative score). In the latter case the MeST always has an overall negative score. Tables 2 and 3 summarize the results of the MeST screening experiments.

[0399] Using the scoring criteria and literature based investigation of potential gene function, 80 genes were selected for chip amplicon design. MeSTs from the comparisons based on PSA recurrence were prioritized, but many of the MeSTs from the other comparisons were included in the amplicon design list.

### Example 2

### Real-Time PCR Study

### Experimental Design

[0400] MSP assays were developed on the Taqman™ 7900 for strong candidates from MeST screening in order to obtain early data on the performance of the MeSTs as markers of prostate cancer aggressiveness.

[0401] As used herein the term MSP-MethyLight shall be taken to mean an assay comprising the amplification of a bisulfite treated sequence by means of methylation specific primers and the detection of resultant amplificates by means of MethyLight detection oligonucleotides (also referred to as ‘probes’).

[0402] MSP-MethyLight assays were developed for a number of MeSTs (see Table 12). The assays were tested on artificially methylated DNA and dilutions of methylated DNA in unmethylated DNA to ensure assay performance. All assays were able to amplify as little as 100 picograms of methylated DNA in the presence or absence of 20 to 100 nanograms of unmethylated DNA. Most of the assays were quantitative between 0.1 and 100% methylation.

[0403] Of the 36 assays, 21 were methylated in a pool of prostate tumor DNAs. These 21 assays were first tested on 46 samples from the screening process. These 46 samples included 14 prostatectomies from patients who recurred in less than 24 months and 18 prostatectomies from patients who did not recur after at least 48 months. In addition, there were fourteen patients without follow up information; nine were high Gleason (Score 8-10) and 5 were low Gleason (Score 2-6). The data from this experiment were used to choose seven assays for an independent sample set.

[0404] The second sample set consisted of 26 frozen radical prostatectomy samples from patients with early PSA recurrence, with a median time to PSA recurrence of 6 months, and 30 samples from patients with no PSA recurrence after at least 48 months (median follow up time was 60 months). The MethylLight™ assays were used to measure the amount of DNA methylated at each locus by comparing the threshold cycle (Ct) to a standard curve of methylated DNA. A control assay was used to measure the total amount of DNA. All samples were run in triplicate for all assays. The primer and probe sequences are listed in Table 12. The ratio of the methylated DNA to the total amount of DNA was used to indicate the methylation status of each candidate in each sample.

### Results

[0405] The methylation values for each assay were used to construct ROC curves (FIGS. 2 to 8) and calculate sensitivity, specificity, and p values. The data are summarized in Table 4. The AUC values for some of the candidates suggest that the methylation of the marker could have prognostic value. Six candidates had an AUC of 0.68 or greater. The strongest candidates, SEQ ID NO: 19 (GPR7) and SEQ ID NO: 35 (genomic region downstream of FOXL2), were significant by a Wilcoxon test after Bonferroni correction. When the specificity is set to 87% for these two assays, the sensitivity is around 50% for each. (SEQ ID NOs correlated to gene names in table 11.)

### Example 3

### Chip Study

[0406] In the chip study, a gene panel composed of candidate genes and selected MeSTs were analyzed on 329 samples using the applicant's microarray technology.

### Sample Set

[0407] The sample set included 329 frozen samples obtained from radical prostatectomies. Only samples with an estimated percent tumor of at least 70% were used, and the median estimated percent tumor (by volume) was 90%. Some sample providers achieved high percent tumor either by coring out a section of the frozen prostate known to contain tumor or by dissecting normal tissue away from the tumor. Patients who received neo-adjuvant therapy were not excluded from the study. Clinical information on disease free survival was not used for any patient receiving adjuvant therapy prior to disease recurrence.

[0408] Gleason scores were available for almost all prostatectomies. For some samples, the Gleason score of the portion of the tumor provided to the applicant was also available. The sample set consisted of samples that qualified for one of the two extreme Gleason categories (high or low), samples from patients that qualified for the two relapse categories (early or no relapse), or samples that fell into multiple categories (e.g., high Gleason and early recurrence). Within the sample set, there were 135 samples with low Gleason scores (1+2, 2+1, 2+2, 2+3, 3+2, and 3+3). There were 99 samples with high Gleason scores (3+5, 5+3, 4+4, 4+5, 5+4, and 5+5). For some of the samples, clinical follow up information was available. Sixty-five patients experienced PSA recurrence in less than two years, and 88 patients did not recur after at least 4 years follow up.

[0409] For control purposes additional samples were included. In order to control the quality and the functionality of oligos, unmethylated (phi-29 DNA) and artificially methylated DNAs (Promega) were used. Additionally, 16 DNA samples from lymphocytes were processed in parallel to the test samples.

### Array

[0410] The array contained oligos representing 62 different candidates. Fifty-one of the candidates were MeSTs. One MeST, SEQ ID NO:32, was represented by two non-overlapping amplicons, both near exon one of the gene. For all of the MeSTs, the amplicon was designed as close to the MeST sequence as possible in a CpG rich region. An amplicon for the X chromosome gene ELK1 was included for analysis of male and female control lymphocyte samples.

[0411] Other analysed genes included CCND2 (Cyclin D2 Padar et al 2003), CD44 (Woodson et al, 2004), EDNRB1 (endothelin receptor B; Woodson et al 2004; Nelson et al 1997), GSTP1 (glutathione S-transferase pi; Maruyama et al 2002), RARB (retinoic acid receptor, beta; Singal et all 2004), PTGS2 (prostaglandin-endoperoxide synthase 2; Yegnasubramanian et al 2004), RASSF1 (Ras association domain family 1; Liu et al 2002), ESR2 (estrogen receptor 2; Zhu et al 2004), DRG1 (developmentally regulated GTP binding protein 1; Bandyopadhyay et all 2003), and CDKN2A (p 16; Halvorsen et al 2000). DRG1 was represented with two amplicons. In all cases, CpG rich areas near the promoter or exon 1 were targeted. For p16, the CpG rich area encompassing exon 2 was used because higher methylation rates have been noted in the literature (Nguyen et all 2000).

[0412] A complete overview of all analyzed genes can be found in Table 11.

### Statistical Methods; Analysis of Chip Data

[0413] From Raw Hybridization Intensities to Methylation Ratios

[0414] The log methylation ratio (log(CG/TG)) at each CpG position is determined according to a standardized preprocessing pipeline that includes the following steps:
[0415] For each spot the median background pixel intensity is subtracted from the median foreground pixel intensity. This gives a good estimate of background corrected hybridization intensities;
[0416] For both CG and TG detection oligonucleotides of each CpG position, the background corrected median of the 4 redundant spot intensities is taken;
[0417] For each chip and each CG/TG oligo pair, the log(CG/TG) ratio is calculated; and
[0418] For each sample, the median of log(CG/TG) intensities over the redundant chip repetitions is taken.

[0419] This log ratio has the property that the hybridization noise has approximately constant variance over the full range of possible methylation rates (Huber et al., 2002).

### Principle Component Analysis

[0420] The principle component analysis (PCA) projects measurement vectors (e.g. chip data, methylation profiles on several CpG sites etc.) onto a new coordinate system. The new coordinate axes are referred to as principal components. The first principal component spans the direction of the largest variance of the data. Subsequent components are ordered by decreasing variance and are orthogonal and uncorrelated to each other. Different CpG positions contribute with different weights to the extension of the data cloud along different components. PCA is an unsupervised technique, i.e. it does not take into account any group or label information of the data points (for further details see e.g. Ripley, 1996). PCA is typically used to project high dimensional data (in our case methylation-array data) onto lower dimensional subspaces in order to visualize or extract features with high variance from the data. In the present report we used 2 dimensional projections for statistical quality control of the data. We investigated the effect of different process parameters on the chip data and excluded that changing process parameters caused large alterations in the measurement values.

[0421] A robust version of PCA was used to detect single outlier chips and exclude them from further analysis (Model et al., 2002).

### T² Control Charts

[0422] To control the general stability of the chip production process we use methods from the field of multivariate statistical process control (MVSPC). Our major tool is the T² control chart, which is used to detect significant deviations of the chip process from normal working conditions (Model et al., 2002).

[0423] The T² chart is constructed as follows:

1. Order the chip data with respect to a process parameter (e.g. hybridization date or spotting robot);
2. Define a historic data set, which describes the chip process under normal working conditions (e.g. the first 75 hybridized chips). In the chart, data from the historical data set are indicated by a special plot symbol; and
3. Compute the distance of every new chip to the historic data set. If the distance of several consecutive chips exceeds a given control limit the process has to be regarded as out of control.

[0424] Use of T² charts to monitor the chip production process allows us to efficiently detect and eliminate most systematic error sources.

### Hypothesis Testing

[0425] Our main task is to identify markers that can make a significant contribution to the class prediction of samples. A significant contribution is detected when the null-hypothesis that a prediction model including the marker does not improve classification performance over a model without the marker can be rejected with p<0.05. Because we apply this test to a whole set of potential markers, we have to correct the p-values for multiple testing. We do this by applying the conservative Bonferroni correction, which simply multiplies the single marker p-values with the number of potential markers tested. We also give results with the less conservative False Screening Rate (FDR) method (Dudoit et al 2002).

[0426] Throughout this report a marker (sometimes also simply referred to as gene or amplicon) is a genomic region of interest (ROI). It usually consists of several CpG positions in the respective area. For testing the null hypothesis that a marker has no predictive power we use the Wilcoxon rank sum tests to compare groups. A significant test result (p<0.05) indicates a shift between the distributions of the respective methylation log ratios, i.e. ln(CG/TG). The mean of all oligos for each marker was used to combine CpGs before Wilcoxon statistics were generated. This approach has the advantage that it favors markers showing co-methylation.

[0427] A significant p-value for a marker means that the methylation of this ROI has some systematic correlation to the question of interest as given by the two classes. In general a significant p-value using the Wilcoxon rank sum test also implies good classification performance.

### Class Prediction by ROC Analysis

[0428] Receiver Operation Characteristic (ROC) analysis was used to estimate how well the CpG ensemble of a selected marker can differentiate between different tissue classes. An ROC curve is a plot of true positive rate (sensitivity) versus false positive rate (1-specificity) for a marker over all possible test thresholds. The Area Under the Curve (AUC) of an ROC curve gives the probability of properly classifying a random sample and can thus be used to evaluate overall marker performance. The AUC is related to the Wilcoxon test statistic and comparative ranking of markers by AUCs or Wilcoxon p-values is equivalent. The mean of all oligos for each marker was used to combine CpGs before ROC analysis. This approach has the advantage that it favors markers showing co-methylation.

### Experimental Performance

### DNA Extraction

[0429] Samples were received from external collaborators either as frozen tissues or extracted genomic DNA. DNA from tissue samples was isolated at Epigenomics Berlin using the Qiagen DNA Mini Kit.

[0430] The DNA quality of all delivered and extracted samples was first assessed by photometrical measurements. Extinctions at 260 nm and 280 nm as well as A260/280 ratios were determined and the resulting concentrations were calculated. For most of the DNAs used, A260/280 ratios between 1.6 and 1.9 were determined indicating sufficient purity. For some samples ratios in the range of 1.2-1.5 were calculated. Nevertheless, these DNAs were processed as well.

[0431] After photometrical measurements 200 ng of the genomic DNAs were applied to a 0.8% agarose gel and gel electrophoresis was performed. FIG. 8 shows a typical gel image. No or only minor signs of degradation were observed, indicating a good overall quality of the DNAs used.

### Bisulfite Treatment and Multiplex PCR

[0432] Total genomic DNAs from all selected samples as well as control DNAs were bisulfite treated converting unmethylated cytosines to uracil. Methylated cytosines are conserved. Bisultite treatment was performed using Epigenomics' dioxane bisulfite treatment process. In order to avoid a joint processing of all samples with the same biological background resulting in a potential process-bias in the data later on, the samples were randomly grouped into processing batches. Batches of 50 samples were randomized for the Gleason score and PSA outcome. Two independent bisulfite reactions were performed per DNA sample. After bisulfitation, 11.25 ng of each sample was used in 8 subsequent multiplex PCR (mPCR) reactions containing 8 primer pairs each.

[0433] For monitoring the mPCR results, gel electrophoresis was performed for all PCR products. To find the best composition of eight primer pairs in a mPCR-set, ALF analysis was used, comparing a mixture of single PCR products with different variants of mPCR-sets.

### ALF Express Analyses:

[0434] For evaluation of the amplified fragments, mPCR products of Promega DNA were analyzed using the ALF Express-technology. The results for those mPCRs were compared to the mixture of single PCR products. FIG. 9 illustrates the result for an 8-plex PCR. All 64 fragments (eight 8-plex-PGRs) selected for the study could be amplified in the performed mPCR experiments. In some cases undesired side products were obtained.

### Agarose Gel Electrophoresis:

[0435] As mentioned above two independent bisulfite reactions and PCRs were performed per DNA sample and the PCR products obtained were applied to a 2% agarose gel. In FIG. 10 a typical gel image is shown illustrating the mPCR performance for 10 samples. No visible PCR product implies failure of bisulfite treatment or PCR amplification. The PCR was then repeated with twice the amount of DNA (22.5 ng). Bisulfite treated DNAs that failed again were excluded from the study. If we obtained only one hybridization probe (64 pooled PCR products) from a sample, 4 chips were hybridized using this single probe. If the probes from two independent bisulfite treatments of a sample were successfully amplified, both probes were hybridized onto two chips each.

[0436] Four (4) out of 331 samples processed (including control samples) could not be amplified, despite several attempts. These samples were not further processed.

### Results of Chip Study

[0437] Our primary analysis was a comparison of samples with high Gleason scores (8-10) and low Gleason scores (2-6 with no grade 4 or 5 component). These classes are categories A and C in Table 5. For our second comparison, we used a group of samples from patients with early PSA recurrence after surgery (<2 years) and a group with no recurrence (>4 years follow up). These classes are A1, B1, C1, and D1 for the no recurrence group and A2, B2, and C2 for the recurrence group (see Table 5). These two sample sets (Gleason and clinical outcome) overlapped somewhat. Our third comparison analyzed only patients with intermediate Gleason (3+4, 4+3, 2+5, 5+2, 2+4, 4+2), to determine whether methylation of our candidates sequences correlates with early recurrence in these patients. Therefore, only categories B1 and B2 were included.

[0438] Tumor Tissue vs. Lymphocytes

[0439] In order to evaluate the diagnostic value of the chip, sixteen lymphocyte samples were included into the study. Prostate cancer tissues and lymphocytes were compared using Wilcoxon rank sum statistics. A ranked display for the ten best-amplificates is given in FIG. 12. Whereas the lymphocyte group is somewhat homogeneous, the figure displays larger variability for the prostate cancer samples. Differences between groups are significant at the 0.05 level (after 5% false discovery rate correction) for amplificates of CDRN2A, ELK1, GSTP1, RARB, PTGS2, RASSF1, ESR2, ONECUT2, BTG4, SLC35F2, HOXB5, LIMK1, HIST1H4J, SEQ ID NO: 35, EPAS1, NOTCH1, SEQ ID NO: 55, PTPRN2, Q9NP73, MX1, DOCK10, CCND2, ISL1, SNAPC2, GRN, H2AFY2, WDFY3, FOS, FAT, Q86SP6, SLC38A1, SNRPN, GPRK5, FBN2, ARHGEF18, RHOC, KBTBD6, NR2E1, PSD, DRG1, Q8N365, SEQ ID NO: 44, Q96S01, CD37, CMYA3, SEQ ID NO: 61, Q8NCX8 and ZNF566

### Candidate Markers for Gleason

[0440] High Gleason vs. Low Gleason Comparison

[0441] Wilcoxon rank statistics were used to analyze differences in methylation profiles of patients classified as high Gleason (Score 8-10) and low Gleason (Score 2-6, no grade 4 or 5 component). The high Gleason class consists of 98 samples and the low Gleason class consists of 135 samples. FIG. 12 shows the results of this analysis.

[0442] For 25 amplificates, the Bonferroni corrected p-value of the Wilcoxon test is below 0.05. For a discussion of biological relevance see section below. FIG. 13 displays the methylation matrix of the 10 best markers.

[0443] The AUC/sensitivity/specificity of the candidate marker amplificates are given in Table 6.

[0444] FIG. 13 shows the High Gleason vs. Low Gleason methylation matrix of the 10 markers with best AUC. Each column represents one sample; each row one oligonucleotide (1, 2, or 3 CpG sites each). Oligonucleotides are grouped per marker candidate. The indicated markers are ordered from top to bottom with increasing AUC. On the right side of each marker Bonferroni corrected Wilcoxon p-value and AUC are given. Below the AUC sensitivity at a specificity of ˜0.75 are given enclosed in brackets. Methylation data are centered and normalized to one standard deviation for individual oligonucleotides. The color represents the relative distance of the oligonucleotide methylation status from the mean value. Light grey represents hypomethylated CpGs within an oligonucleotide while dark grey indicates hypermethylated CpGs within an oligonucleotide.

[0445] Candidate Markers for PSA Recurrence

[0446] Early Recurrence vs. No Recurrence Comparison

[0447] We next analyzed differences in methylation profiles of patients classified as early recurrence (PSA relapse in less than 24 months) and no recurrence (no PSA relapse after at least 4 years).

[0448] For three (3) amplificates the Bonferroni corrected p-value of the likelihood-ratio (LR) test is below 0.05. For a discussion of biological relevance see below.

[0449] The AUC/sensitivity/specificity of the top marker amplificates are given in Table 7.

[0450] FIG. 15 shows Early Recurrence vs. No recurrence methylation matrix of the 10 markers with best AUC. Each column represents one sample; each row one oligonucleotide (1, 2, or 3 CpG sites each). Oligonucleotides are grouped per marker candidate. The indicated markers are ordered from top to bottom with increasing AUC. On the right side of each marker Bonferroni corrected Wilcoxon p-value and AUC are given. Below the AUC sensitivity at a specificity of ˜0.75 are given enclosed in brackets. Methylation data are centered and normalized to one standard deviation for individual oligonucleotides. The color represents the relative distance of the oligonucleotide methylation status from the mean value. Light grey represents hypomethylated CpGs within an oligonucleotide while dark grey indicates hypermethylated CpGs within an oligonucleotide.

Candidate Markers for PSA Recurrence in Patients with Intermediate Gleason Scores Early Recurrence vs. No Recurrence Comparison

[0451] Finally, we analyzed differences in methylation profiles of intermediate Gleason samples from patients classified as early recurrence PSA relapse in less than 24 months) and no recurrence (no PSA relapse after at least 4 years). Intermediate Gleason included all patients with scores 2+5, 5+2, 3+4, 4+3, 2+4, 4+2, 1+5, 5+1, and these patients are a subset of the group used in section 6.6.2. The majority were Gleason 3+4 or 4+3. Although no amplificates displayed a Bonferroni corrected p-value below 0.05 several markers showed promising AUCs (see Table 8). It is likely this comparison was underpowered due to the small sample set for this comparison.

[0452] For a discussion of biological relevance see below.

### Co-Methylation Revealed by Microarray Analysis

[0453] Due to the design of the current chip study, we were able to determine areas within marker fragments that were co-methylated. In this design, at least two oligo pairs, each containing 1, 2 or 3 CpG sites, were included for each marker fragments analyzed. Details of CpG sites targeted in the array analysis can be found in FIG. 16 onwards. Evidence of co-methylation is apparent in the ranked matrix figures. In the ranked matrix figures from the microarray analysis each marker fragment is grouped horizontally. Since each marker fragment represents one to three amplicons and a minimum of four and up to thirty individual CpG sites, extensive information concerning the methylation status of the fragment can be determined. Consecutive dark grey boxes within the grouping of a fragment in a vertical direction indicate co-methylation of the oligonucleotides (and CpGs within that oligo). These data will be further analysed for the most discriminatory areas within a fragment and this information will be utilized for real-time PCR assay design.

### Results Summary

[0454] In the primary analysis, a comparison of high and low Gleason samples, 25 markers met the criteria for statistical significance using very conservative statistical methodology. This comparison relies on Gleason as a surrogate indicator of aggressiveness, but it was used as the primary analysis because Gleason information was available for nearly all tumors. Fewer samples were available for the additional analysis, based on time to PSA relapse, but still two markers reached statistical significance.

### Discussion

### Biological Aspects

### MeST Screening

[0455] The MeST Screening process was very successful, yielding over 400 candidates. In the real-time PCR and chip studies, the MeST candidates performed well. In the real-time PCR study, three MeSTs outperformed GSTP1. In the chip study, the top five candidates in the Gleason comparison are all MeSTs. Therefore, the screening process contributed valuable candidate markers for distinguishing aggressive and non-aggressive tumors.

[0456] Furthermore, MeSTs from all of the screening comparisons were represented in the list of top scoring candidates. The top candidate marker in the Gleason comparison, GPR7, was discovered in two outcome comparisons, the Gleason comparison, and the comparison based on stage. Another top performer, DOCK10, was discovered in the comparison based on prostatic zone. Of the top markers, only ABHD9 was discovered in the comparison of normal tissue adjacent to tumors from patients in the two outcome categories. We conclude that all of the screening genome-wide screening comparisons yielded important candidate markers.

### Candidate Evaluation by MethyLight

[0457] Many candidate MeSTs were chosen for real-time PCR assay development while samples were being collected for the chip study. The assays were pre-screened on a pooled DNA sample from many prostate tumor samples. This step allowed pre-selecting only those assays that could potentially be informative Over one-third of the assays were ruled out at this step. Next, the remaining assays were tested on the DNA from the screening samples in order to prioritize the assays. Then, on the final set of 56 independent samples, six of the seven prioritized assays performed well.

[0458] The success of the real-time PCR experiment suggests that there is significant co-methylation in these markers. Therefore, real-time PCR assays, which all require some degree of co-methylation, will be suitable candidates for a final assay choice. The real-time PCR experiment relied heavily on quantification of methylation differences: For nearly all of the assays, the difference between the early recurrence group and the non-recurrence group was a quantitative methylation difference. The final assay type will need strong quantitative abilities.

### Candidate Evaluation by Methylation Array

[0459] The chip experiment was highly successful, demonstrating marker potential for many candidate sequences. In the comparison of high and low Gleason samples, 25 amplicons were significantly different. The vast majority of these are hypermethylated in high Gleason samples. The three candidates analyzed by real-time PCR were among the top six markers in this Gleason comparison. Therefore there is consistency between the two methods of measuring methylation.

[0460] The comparison based on patient PSA relapse characteristics had lower sample numbers. Despite these low numbers, we were still able to prove that at least three (3) of our candidate markers can significantly distinguish patients experiencing early relapse from patients not experiencing relapse. In general, methylation is higher in patients experiencing early recurrence. In this comparison, the top three candidates in the real-time PCR study were the top three most significant markers in the chip analysis. The AUCs for GPR7, SEQ ID NO: 35 (downstream of FOXL2), and ABHD9 were 0.72, 0.72, and 0.66 respectively in the chip clinical outcome data and 0.76, 0.75, and 0.70 respectively in the real-time PCR clinical outcome data.

[0461] Treatment for patients with high and low Gleason is often clear. Anyone with high Gleason will be recommended for aggressive treatment, including definitive treatment (surgery or radiation) and possibly adjuvant therapy. Patients with low Gleason have the option of deferring definitive treatment. While there are still some uncertainties for these patients, the best options are even less clear for patients with intermediate Gleason levels. Furthermore, the majority of patients being diagnosed with prostate cancer today have intermediate Gleason scores of 6 or 7. These are the patients that can be helped the most by a molecular classification test. The amplicons with the highest AUCs in the comparison based on clinical outcome were GPR7 (AUC=0.72) and SEQ ID NO: 35 (AUC=0.72). When this comparison was restricted to patients with intermediate Gleason scores (1+5, 5+1, 2+4, 4+2, 3+4, 4+3, 2+5, 5+2), the AUC for both of these markers was still 0.72 or greater. These results suggest that a methylation-based assay will provide information even for patients with middle range Gleason scores.

### Biology of Marker Genes

[0462] Several interesting markers were identified by the real-time PCR and chip studies. One of the real-time PCR markers is a G protein coupled receptor (GPR7; SEQ ID NO:19), however very little is known about the gene product. A second marker from the real-time study is located in a CpG island in the promoter of the gene Abhydrolase Domain containing 9 (ABHD9; SEQ ID NO:37). The closest gene to SEQ ID NO:35 is FOXL2. The MeST is in a CpG island several kilobases downstream of this gene. SEQ ID NO:63 is in an area with several histone genes.

[0463] Additional markers emerged in the chip study. NOTCH1 (SEQ ID NO:41) controls a signalling pathway that regulates interactions between adjacent cells. Many labs have studied the role of this gene in carcinogenesis and metastasis. Little is known about many of the candidates, including DOCK10 (SEQ ID NO:16), SEQ ID NO:51, which is in the promoter of a gene called Kelch repeat and BTB (POZ) domain-containing 6, and SEQ ID NO:17, which is located between an EST and B-cell Translocation Gene 4. BTG4 has been shown to have growth inhibitory properties (Buanne et al 2000).

[0464] PTGS2 (SEQ ID NO:9) is the only gene previously shown in the literature to be more methylated in prostate tumors of patients who recurred soon after prostatectomy (Yegnasubramanian et al 2004). PTGS2, also known as cyclo-oxygenase (COX2), is a further promising candidate in both the Gleason and the clinical outcome analyses, with AUCs of 0.69 and 0.65 respectively. GSTP1 is the most highly studied methylation marker in prostate cancer, and while there are no published data directly demonstrating its prognostic value, there is some evidence that its methylation correlates with Gleason grade (Maruyama et al 2002). However, this correlation was not confirmed in another study (Woodson et al 2004). In the instant data, GSTP1 methylation significantly correlates with Gleason grade, but the AUC in the clinical outcome comparison is only 0.58.

### Medical Aspects

[0465] The methylation candidates that have emerged from our Gleason comparison are informative prognostic markers. We have shown that some of these candidates that correlate with Gleason categories can also predict PSA relapse, even in patients with intermediate Gleason scores. Therefore it is likely that our analysis based on Gleason will provide markers that provide additional information to Gleason.

[0466] As individual markers, the chip candidates reach 40-60% sensitivity when the specificity is set at 75%. In the real-time study, the sensitivity of three of the markers was higher, reaching 50-60% at a specificity of 85%. The enhanced performance in the real-time might be due to the quantitative abilities of MSP-MethyLight. Approximately 20% of patients experience relapses within 5-10 years after surgery. If this were set as the prevalence of aggressive tumors in the radical prostatectomy population, then a marker such as ours with 50% sensitivity and 85% specificity would have a negative predictive value of 0.87 and a positive predictive value of 0.45. Therefore, a marker with this performance would define a group of patients with only a 13% chance of recurrence after surgery and a group of patients with a 45% chance of recurrence. The first group could just be monitored for PSA rise, and the second group would be candidates for adjuvant therapies.

[0467] While these candidates have been studied in prostatectomy samples, they will also be useful for analysis of biopsies. A marker that predicts outcome after prostatectomy correlates with the aggressiveness and metastatic potential of the tumor, and these properties will also be present in the biopsy. After biopsy and staging tests, patients opt for watchful waiting, definitive curative therapy, or a combination of treatments (such as surgery plus radiation or androgen ablation). A molecular test with high negative predictive value would allow more patients to choose watchful waiting. A molecular test with sufficiently high positive predictive value would select a subset of patients who should not receive radiation or surgery only. Thus, these candidate methylation markers have the potential to reduce both under and over treatment of prostate cancer.

### Example 4

### Real Time Quantitative Methylation Analysis

[0468] Genomic DNA was Analyzed Using the Real Time PCR Technique after Bisulfite Conversion.

[0469] The QM assay (=Quantitative Methylation Assay) is a Real-time PCR based method for quantitative DNA methylation detection. The assay principle is based on non-methylation specific amplification of the target region and a methylation specific detection by competitive hybridization of two different probes specific for the CG or the TG status, respectively. For the present study, TaqMan probes were used that were labeled with two different fluorescence dyes (“FAM” for CG specific probes, “VIC” for TG specific probes) and were further modified by a quencher molecule (“TAMRA” or “Minor Groove Binder/non-fluorescent quencher”).

Evaluation of the QM Assay Raw Data is Possible with Two Different Methods:

[0470] 1. Measuring absolute fluorescence intensities (FI) in the logarithmic phase of amplification Difference in threshold cycles (Ct) of CG and TG specific probe.

[0471] In the following series of quantitative methylation assays the amount of sample DNA amplified is quantified by reference to the gene GSTP1 to normalize for input DNA. For standardization, the primers and the probe for analysis of the GSTP1 gene lack CpG dinucleotides so that amplification is possible regardless of methylation levels. As there are no methylation variable positions, only one probe oligonucleotide is required.

[0472] The reactions are calibrated by reference to DNA standards of known methylation levels in order to quantify the levels of methylation within the sample. The DNA standards were composed of bisulfite treated phi29 amplified genomic DNA (i.e. unmethlyated), and/or phi29 amplified genomic DNA treated with Sss1 methylase enzyme (thereby methylating each CpG position in the sample), which is then treated with bisulfite solution. Seven different reference standards were used with 0%, (i.e. phi29 amplified genomic DNA only), 5%, 10%, 25%, 50%, 75% and 100% (i.e. phi29 Sss1 treated genomic only).

### Bisulfite Treatment

[0473] Bisulfite treatment was carried out based on the method disclosed by Olek et al. Nucleic Acids Res. 1996 Dec. 15; 24(24):5064-6, and optimized to the applicant's laboratory workflow.

### Quantification Standards

[0474] The reactions are calibrated by reference to DNA standards of known methylation levels in order to quantify the levels of methylation within the sample. The DNA standards were composed of bisulfite treated phi29 amplified human genomic DNA (Promega) (i.e. unmethlyated), and/or phi29 amplified genomic DNA treated with Sss1 Methylase enzyme (thereby methylating each CpG position in the sample), which is then treated with bisulfite solution. Seven different reference standards were used with 0%, (i.e. phi29 amplified genomic DNA only), 5%, 10%, 25%, 50%, 75% and 100% (i.e. phi29 Sss1 treated genomic only). 2000 ng batches of human genomic DNA (Promega) were treated with bisulfite. To generate methylated MDA DNA, 13 tubes of 4.5 μg MDA-DNA (700 ng/μl) was treated with Sss1.

### Control Assay

[0475] The GSTP1-C3 assay design makes it suitable for quantitating DNAs from different sources, including fresh/frozen samples, remote samples such as plasma or serum, and DNA obtained from archival specimen such as paraffin embedded material. The following oligonucleotides were used in the reaction to amplify the control amplificate:

Control Primer1:

(SEQ ID NO: 966)

GGAGTGGAGGAAATTGAGAT
Control Primer2:

(SEQ ID NO: 967)

CCACACAACAAATACTCAAAAC
Control Probe:

(SEQ ID NO: 968)

FAM-TGGGTGTTTGTAATTTTTGTTTTGTGTTAGGTT-TAMRA
Cycle program (40 cycles):
95° C., 10 min
95° C., 15 sec
58° C., 1 min

### Assay Design and Reaction Conditions

Two assays were developed for the analysis of the gene PITX2(SEQ ID NO:961)
Assay 1:

| | |
|---|---|
| Primers: | GTAGGGGAGGGAAGTAGATGTT (SEQ ID NO:969) |
| | TTCTAATCCTCCTTTCCACAATAA (SEQ ID NO:970) |

Probes: FAM-AGTCGGAGTCGGGAGAGCGA-TAMRA (SEQ ID NO:971)

VIC-AGTTGGAGTTGGGAGAGTGAAAGGAGA-TAMRA (SEQ ID NO:972)

Amplicon (SEQ ID NO:973):

[chemical structure]

Length of fragment: 143 bp

[0477] Positions of primers, probes and CpG dinucleotides are highlighted.

[0478] PCR components (supplied by Eurogentec): 3 mM MgCl₂ buffer, 10× buffer, Hotstart TAQ, 200 μM dNTP, 625 nM each primer, 200 nM each probe

| | |
|---|---|
| Cycle program (45 cycles): | 95° C., 10 min |
| | 95° C., 15 sec |
| | 62° C., 1 min |

### Assay 2:

| | |
|---|---|
| Primers: | AACATCTACTTCCCTCCCCTAC (SEQ ID NO:974) |
| | GTTAGTAGAGATTTTATTAAATTTTATTGTAT (SEQ ID NO:975) |

Probes: FAM-TTCGGTTGCGCGGT-MGBNQF (SEQ ID NO:976)

VIC-TTTGGTTGTGTGGTTG-MGBNQF (SEQ ID NO:977)

Amplicon (SEQ ID NO:978):

[chemical structure]

Length of fragment: 164 bp

[0480] The positions of probes, primers and CpG positions are highlighted.

[0481] The probes cover three co-methylated CpG positions.

[0482] PCR components (supplied by Eurogentec): 2.5 mM MgCl₂ buffer, 10× buffer, Hotstart TAQ, 200 μM dNTP, 625 nM each primer, 200 nM each probe

| | |
|---|---|
| Program (45 cycles): | 95° C., 10 min |
| | 95° C., 15 sec |
| | 60° C., 1 min |

[0483] The extent of methylation at a specific locus was determined by the following formulas:

Using absolute fluorescence intensity: methylation rate=100*I(CG)/(I(CG)+I(TG)) (I=Intensity of the Fluorescence of CG-Probe or TG-Probe)

Using threshold cycle Ct: methylation rate=100*CG/(CG+TG)=100/(1+TG/CG)=100/(1+2̂delta(ct))

(assuming PCR efficiency E=2; delta (Ct)=Ct(methylated)−Ct (unmethylated))

### Example 5

### Validation

[0484] The main goal of this phase of the investigation was to confirm the significance of previously identified marker candidates and optimize methylation cut-offs. The markers should be suitable to split patients who undergo prostatectomy into two groups: one with a high chance of PSA recurrence and one with a low chance of PSA recurrence. In addition, the markers should provide additional information to Gleason grade analysis. Markers meeting these criteria will have an important clinical role in selection of prostatectomy patients for adjuvant therapy.

[0485] The applicant had previously identified several markers with significantly higher methylation levels in patients who experienced PSA recurrence within 24 months of surgery compared to patients who did not experience PSA recurrence (see above Examples 1 to 4). Six of these markers were transferred to a real-time platform (QM Assay). These assays were used to analyze the methylation levels of 612 paraffin embedded prostatectomy samples from a cohort of node-negative patients from three institutions.

[0486] The primary aim of the invention was to provide markers that can differentiate between patients with low chance for PSA recurrence after surgery and those with a high chance for PSA recurrence. The performance of these markers as compared to traditional prognostic indicators such as Gleason grading and stage information is also provided.

[0487] It is a further aim of the present invention to determine where the markers are most informative in relation to current clinical prognostic assessment and accordingly provide particularly preferred use embodiments of the present invention. It is particularly preferred that a molecular test according to the present invention is combined, either formally or informally, with information from other prognostic sources, in particular Gleason grading.

### Methods: QM Assay Description

[0488] Each QM-assay was developed to enhance performance without drastically altering standard conditions in order to allow future multiplexing. Primer and probe concentrations, MgCl₂ concentration and annealing temperature were optimized under fixed buffer and polymerase conditions. The assays were designed and optimized to ensure quantitative methylation analysis of each marker between 10 and 100 percent methylation. The assay products were checked on an agarose gel and no undesired products were detected. The results of the optimization procedure are shown in the following tables.

### Sample Set

[0489] Paraffin-embedded prostatectomy tissue samples from 605 patients were analyzed. The samples were provided by the Baylor College of Medicine SPORE, Stanford University Department of Urology, and Virginia Mason Hospital in Seattle. The samples from Stanford and Virginia Mason were prepared by first finding the surgical block with the highest percent tumor, then sectioning the block. Three tubes were prepared, each with three 10 micron thick sections. The procedure was slightly different at Baylor. A core of tissue was removed from the tumor within the prostatectomy block, and then this core was cut into 10 micron sections. Ten sections were included into each of three tubes.

[0490] An adjacent section was mounted on a slide and H&E stained for histological analysis. A pathologist reviewed these slides for an independent determination of Gleason grading and percent tumor. The Gleason results were used for all analyses in this report. The original provider Gleason values are available, but they were not used for analysis due to known and hypothetical biases among the providers. Stanford, for instance, uses a percentage Gleason 4/5 for reporting grade, while the other two providers use the traditional system. The measured Gleason values provided an independent and uniform measurement.

[0491] A few samples were found to have no tumor cells on the H&E slide, and these patients were omitted from the analysis. In addition, we found a few patients that did not have a PSA nadir after surgery. These patients were also excluded from the study. In total, 612 patients were included in the data analysis.

[0492] Due to their coring technique, the percent tumor of the samples provided by Baylor were higher than the other providers.

[0493] All patients, aged 40-80, undergoing surgery at the three institutions during certain years were included in the study, with the exception of patients who received neo-adjuvant or adjuvant therapy (before PSA rise) and patients with positive nodes at the time of surgery. For Baylor, the time period was 1993-1998, for Virginia Mason it was 1996-2000, and for Stanford it was 1996-1999.

[0494] The overall cohort is similar to other prostatectomy cohorts described in the literature, such as the cohort collected by William Catalona and described in 2004 (Roehl et al.). The patient cohorts from each provider are similar for nearly all clinical parameters. One exception is the type of recurrence. While other institutions typically wait until the patient's PSA rises to 0.2 ng/ml or higher after surgery, the Stanford Department of Urology treats many patients when their PSA rises to 0.05. Therefore, Stanford has a higher rate of recurrence based on the decision to treat criteria and a lower rate of recurrence based on the PSA level (0.2 ng/ml) criteria. See section 6.1 for a summary of the event definition criteria. FIG. 89 provides a histogram of follow-up times for the patient cohort (all three providers included). The white bars consist of the patients who did not have a recurrence before they were censored, and the shaded bars consist of the patients who experienced recurrence. By selecting patients who received surgery from 1993-2000, we have ensured that the median follow-up time of the cohort (66 months) is long enough to have a significant number of patients who have relapsed.

[0495] For deparaffination, the 627 provided PET samples were processed directly in the tube in which they were delivered by the providers. One ml (Virginia Mason and Baylor) or 1.8 ml (Stanford) of limonene was added to each tube and incubated at room temperature for 10 minutes in a thermomixer with occasional vortexing. The samples were centrifuged at 16,000×g for 5 minutes. The limonene supernatant was removed, and if no pellet was detected, centrifugation was repeated at higher speed and the remaining limonene was removed. For samples from Stanford, the deparaffination process was repeated once with 1.6 ml of limonene to get rid of residual paraffin.

[0496] For lysis of the tissue, 190 μl lysis buffer and 20 μl proteinase K was added to each deparaffinated sample. For Stanford samples, 570 μl lysis buffer and 60 μl proteinase K was used. After vortexing, samples were centrifuged briefly and incubated on a thermoshaker at 60° C. for 40 hours. After the incubation, samples were checked to ensure that lysis was complete, and the proteinase was then inactivated at 95° C. for 10 minutes. If the lysed samples were not directly used for DNA extraction, they were stored at −20° C.

[0497] The lysates were randomized based on the sample provider and PSA recurrence. The DNA was isolated using a QIAGEN DNeasy Tissue kit with a few modifications. 400 μl buffer AL/E was distributed to collection tubes and 200 μl of lysate were added. The samples were mixed by shaking for 15 seconds. The lysate/buffer mixtures were applied to the 96-well DNeasy plate columns. The plate was sealed and centrifuged at 5790×g for 10 minutes. The columns were washed once with 500 μl of AW1 and then 500 μl AW2. The DNA was eluted with 120 μl buffer AE. Therefore, the final volume of extracted DNA was approximately 120 μl. The DNA was stored at −20° C.

### Bisulfite Treatment

[0498] The CFF real-time PCR assay was used to quantify the DNA concentration of the samples after extraction.

CFF sequence:

(SEQ ID NO: 979)

TAAGAGTAATAATGGATGGATGATGGATAGATGAATGGATGAAGAAAGAA
AGGATGAGTGAGAGAAAGGAAGGGAGATGGGAGG (84 bp)
CFF-Forward primer

(SEQ ID NO: 980)

TAAGAGTAATAATGGATGGATGATG
CFF-Reverse primer

(SEQ ID NO: 981)

CCTCCCATCTCCCTTCC
CFF TaqMan probe

(SEQ ID NO: 982)

ATGGATGAAGAAAGAAAGGATGAGT

[0499] We adjusted the concentration of each genomic DNA sample so that 1 μg of CFF1 measured DNA was present in 44 μl. The bisulfite treatment of genomic DNA derived from paraffin embedded tissue was performed using a 96 well protocol. Forty-four μl genomic DNA (with approximately 1 μg of amplifiable DNA), 83 μl 4.9M bisulfite solution (pH 5.45-5.5), and 13 μL DME solution were pipetted into the wells of the plate. The samples were thoroughly mixed then placed in a thermocycler with the following program:
[0500] 5:00 min denaturation of DNA at 99° C.
[0501] 22:00 min incubation at 60° C.
[0502] 3:00 min denaturation of DNA at 99° C.
[0503] 1:27:00 hours incubation at 60° C.
[0504] 3:00 min denaturation of DNA at 99° C.
[0505] 2:57:00 hours incubation at 60° C.
[0506] Cooling at 20° C.

[0507] After the incubations, each sample was divided into two 70 μL aliquots. Each aliquot was combined with 280 μL of prepared Buffer AVL/Carrier RNA and 280 μL ethanol. The wells were sealed and the samples were mixed vigorously for 15 seconds. The plate was incubated for 10 minutes at room temperature. The first aliquot was applied to the QIAamp 96 plate and the plate was centrifuged for four minutes at 5790×g. The process was repeated with the second aliquot so that both aliquots were applied to the same binding column. The columns were washed with 500 μL buffer AW1, then 500 μL 0.2 M NaOH, and then twice with 500 μL buffer AW2. The DNA was eluted with 100 μL elution buffer (Qiagen) pre-heated to 70 deg C. The bisDNAs were stored at −20° C.

[0508] The bisulfite treated DNA samples were stored in 8×96 well plates (plate 01-08). The samples and controls were combined onto two 384-well PCR reaction plates for each QM assay. Each QM assay plate contained the samples of 4×96 well plates (85 wells actually used per plate) and 1×96 well plate with standard DNA (7 mixtures of the calibration DNA and water for the no template control PCR reaction). The QM assay plates were run three times.

[0509] The 384-well PCR plates were pipetted with the TECAN workstation. The pipetting program transferred first 10 μl of the mastermix and then 10 μl of the respective DNA into the designated well. The master mix was pipetted in a falcon tube and distributed to 8×500 μl screw cap vials for automatic pipetting with TECAN workstation.

[0510] All QM assays were run on an ABI TAQMAN 7900HT real-time device (SDS 2.2. software) with a reaction volume of 20 μl. PITX2 and CCND2 assays were run with 9600 emulation, and the other assays were not. An automatic sample setup was used to transfer the correct sample names and detector/reporter dyes to the TAQMAN software. The cycling conditions were manually adjusted and ROX was used as passive reference dye. All 384 well PCR plates we analyzed with the SDS2.2 software using the manual analysis settings (baseline setting with start and stop values and manual threshold) to produce results files for each run individually.

### Methods: Evaluation of Marker Performance

### Definition of Events

[0511] After a successful prostatectomy on a patient with non-metastatic disease, there should be no prostate cells left in his body and therefore his PSA levels should drop to zero. A patient's PSA levels are typically measured every 6-12 months after surgery to ensure that the patient remains free of prostate cancer. If PSA becomes detectable and rises to a certain level, the doctor and patient may decide on additional therapy. Therefore, the return and rise of PSA levels are the primary indication of disease recurrence.

[0512] A post-surgical PSA relapse is typically indicated by either a gradual or rapid rise in levels over a series of sequential tests. Depending on the clinical characteristics of the patient or the approach of the institution, patients may be treated as soon as PSA is detected, when it reaches a certain threshold, or when clinical symptoms accompany the PSA rise. Most institutions consider a PSA level of 0.2 ng/ml to be significant, and if a patient's PSA reaches this level and is confirmed to be rising in subsequent tests, he will be offered additional therapy. Stanford Department of Urology, one of the sample providers, considers 0.05 ng/ml to be a PSA recurrence, and considers treatment for patients when their PSA reaches this level.

[0513] An event in this study includes all PSA-based recurrences. A PSA level of 0.2 ng/ml, confirmed in subsequent tests, has been demonstrated to provide the best sensitivity and specificity for detection of recurrence (Freedland et al., 2003). Rise of PSA to this level normally precedes any development of clinical recurrence; therefore, nearly all of the patients in this study are free of clinical recurrence at the time of PSA recurrence. Because Stanford often treats patients with PSA recurrence before they reach this cut-off of 0.2 ng/ml, many of their recurrence patients would be censored in the present study if the PSA level of 0.2 ng/ml was the only considered event. Therefore, patients from any of the three institutions who receive therapy due to PSA levels are also considered an event in this study.

[0514] To summarize, an event is defined in the present study as any rise in PSA to 0.2 ng/ml (confirmed in subsequent test) OR a decision to treat the patient based on PSA criteria.

### Raw QM Data Processing

[0515] All analyses in this report are based on the CT evaluation. Assuming optimal real-time PCR conditions in the exponential amplification phase, the concentration of methylated DNA (Cₘₑₜₕ) can be determined by

$${C}_{meth} = \frac{100}{1 + {2}^{( {CT}_{CG} - {CT}_{TG} )}} [ \% ] ,$$

where
CT_{CG} denotes the threshold cycle of the CG reporter (FAM channel) and
CT_{TG} denotes the threshold cycle of the TG reporter (VIC channel).

[0516] The thresholds for the cycles were determined by visual inspection of the amplification plots (ABI PRISM 7900 HT Sequence Detection System User Guide). The values for the cycles (CT_{CG} and CT_{TG}) were calculated with these thresholds by the ABI 7900 software. Whenever the amplification curve did not exceed the threshold, the value of the cycle was set to the maximum cycle e.g. 50.

[0517] The R software package, version 2.2. (Gentleman and Ihaka 1997), was used for the statistical analysis.

[0518] In addition, we used the “survival” package, version 2.11-5 (http://cran.at.r-project.org/src/contrib/Descriptions/survival.html), for survival analysis.

[0519] Proprietary code was used for k-fold-cross validation, ROC analysis and plot functions.

[0520] Each dataset is represented in a proprietary data object, called “Annotated Data Matrix” (ADM). This data object contains the measurements after quality control and averaging, as well as all necessary annotations for the samples and assays.

### QM Assay Calibration Curves

[0521] A series of mixtures of methylated MDA-DNA and unmethylated MDA-DNA, ranging from 0 to 100 percent methylated, were included in triplicate on each QM PCR plate. These DNAs were used to ensure uniform QM assay performance on all PCR plates. All assays showed strong quantitative abilities between 10 and 100%, and some assays were able to consistently distinguish 5% methylated DNA from unmethylated DNA.

### Statistical Methods

[0522] After quality control, each assay was statistically analyzed.

### Cox Regression

[0523] The relation between recurrence-free survival times (RFS) and covariates were analyzed using Cox Proportional Hazard models (Cox and Oates 1984; Harrel 2001).

[0524] The hazard, i.e. the instantaneous risk of a relapse, is modeled as

h(t|x)=h₀(t)·exp(βx) (3)

and

h(t|x₁, . . . , xₖ)=h₀(t)·exp(β₁x₁+ . . . +βₖxₖ) (4)

for univariate and multiple regression analyses, respectively, where k is 10, m is 100t is the time measured in months after surgery, h₀(t) is the (unspecified) baseline hazard, xᵢ are the covariates (e.g. measurements of the assays) and βᵢ are the regression coefficients (parameters of the model). βᵢ will be estimated by maximizing the partial likelihood of the Cox Proportional Hazard model

[0525] Likelihood ratio tests are performed to test whether methylation is related to the hazard. The difference between 2 Log(Likelyhood) of the full model and the null-model is approximately χ²-distributed with k degrees of freedom under the null hypotheses β₁= . . . =βₖ=0.

[0526] The assumption of proportional hazards were evaluated by scaled Schoenfeld residuals (Themau and Grambsch 2000). For the calculation, analysis and diagnostics of the Cox Proportional Hazard Model the R functions “coxph” and “coxph.zph” of the “survival” package are used.

### Stepwise Regression Analysis

[0527] For multiple Cox regression models a stepwise procedure (Venables and Ripley 1999; Harrel 2001) was used in order to find sub-models including only relevant variables. Two effects are usually achieved by these procedures:
[0528] Variables (methylation rates) that are basically unrelated to the dependent variable (DFS/MFS) are excluded as they do not add relevant information to the model.
[0529] Out of a set of highly correlated variables, only the one with the best relation to the dependent variable is retained.
   Inclusion of both types of variables can lead to numerical instabilities and a loss of power. Moreover, the predictor's performance can be low due to over-fitting.

[0530] The applied algorithm aims at minimizing the Akaike information criterion (AIC).

[0531] The AIC is related to the performance of a model, smaller values promise better performance. Whereas the inclusion of additional variables always improves the model fit and thus increases the likelihood, the second term penalizes the estimation of additional parameters. The best model will present a compromise model with good fit and usually a small or moderate number of variables. Stepwise regression calculation with AIC are done with the R function “step”.

### Kaplan-Meier Survival Curves and Log-Rank Tests

[0532] Survival curves were estimated from RFS data using Kaplan-Meier estimator for survival (Kaplan and Meier, 1958). Log-rank tests (Cox and Oates 1984) are used to test for differences of two survival curves, e.g. survival in hyper- vs. hypomethylated groups. In addition, a variant of the Log-rank test usually referred to as the Generalized Wilcoxon test was applied (for description see Hosmer and Lemeshow 1999). For the Kaplan-Meier analysis the functions “survfit” and “survdiff” of the “survival” package are used.

Independence of Single Markers and Marker Panels from Other Covariates

[0533] To check whether the present markers give additional and independent information, other relevant clinical factors were included in the Cox Proportional Hazard model and the p-values for the weights for every factor were calculated (Wald-Test) (Thernau et al. 2000). For the analysis of additional factors in the Cox Proportional Hazard model, the R function “coxph” is used.

### Multiple Test Corrections

[0534] No correction for multiple testing was done.

### Density Estimation

[0535] For numerical variables, kernel density estimation was performed with a Gaussian kernel and variable bandwidth. The bandwidth is determined using Silverman's “rule-of-thumb” (Silverman 1986). For the calculation of the densities the R function “density” is used.

### Analysis of Sensitivity and Specificity

[0536] The method of calculating sensitivity and specificity using the Bayes-formula was based on the Kaplan-Meier estimates (Heagerty et al. 2000) for the survival probabilities in the marker positive and marker negative groups for a given time T_{Threshold}. The ROCs were calculated for different reference times T_{Threshold} (3 year, 4 years, 5 years, 6 years).

k-Fold Crossvalidation

[0537] For the analysis of model selection and model robustness k-fold crossvalidation (Hastie et al. 2001) was used. The set of observations is randomly split into k chunks. In turn, every chunk was used as a test set, whereas the remaining k−1 chunks constitute the training set. This procedure is repeated m times.

### Results

[0538] The 605 samples were processed as described above. All samples were analyzed with six marker QM assays with three replicates. The data were filtered for quality control, and analyzed as described in the methods section. The clinical performance of each marker is summarized below and the Kaplan-Meier survival curves and ROC curves according to FIGS. 90 to 95. P-values for comparison of survival curves reported in the graphs are based on the ordinary Log-rank test. The results of using the Generalized Wilcoxon test are essentially the same (data not shown).

[0539] The performance of the markers was first examined using the median methylation level as a cut-off. Since this cut-off was fixed before looking at the data, the p values can be used to judge the performance of the markers. Any marker with a significant p value using the median methylation as a cut-off is considered to be validated. The median methylation level might not be the best cut-off for all markers, and for these markers the prognostic separation can be further optimized by choosing the methylation cut-off that results in the lowest p value. Since the cut-off is optimized specifically for p value, the p value no longer can be used to indicate statistical significance.

[0540] For judging the significance of the marker performance using the median methylation as a cut-off, we used a p value of 0.005 (assuming correction for 6 comparisons). Based on p-value (less than 0.008) and event separation, PITX2 is the strongest candidate. GPR7 along with SEQ ID NO:35. Therefore, these two markers are considered validated markers of post-surgical prostate cancer prognosis. SEQ ID NO: 63 was not significant using the median methylation level as a cut-off (p values 0.018 and 0.0059), but perform well when the methylation cut-off is optimized. See Table 17 for results.

[0541] FIG. 90 A shows the Kaplan-Meier survival analysis of the PITX2 marker of the 585 patient samples that passed the quality control filter using the optimized methylation cut-off value (13.5%). FIG. 90B shows the Kaplan-Meier survival analysis of the PITX2 marker using the predefined median methylation value as a cut-off, the p-value was 0.000017. FIG. 90C shows the ROC curve analysis of the PITX2 marker after 5 years of follow-up. The median methylation cut-off is marked as a triangle, and the optimized methylation cut-off is shown as a diamond. The AUC was 0.64.

[0542] FIG. 91A shows the Kaplan-Meier survival analysis of the GPR7 marker of the 596 patient samples that passed the quality control filter using the optimized methylation cut-off value (18.06%). FIG. 91B shows the Kaplan-Meier survival analysis of said marker using the predefined median methylation value as a cut-off, the p-value was 0.0016. FIG. 91C shows the ROC curve analysis of said marker after 5 years of follow-up. The median methylation cut-off is marked as a triangle, and the optimized methylation cut-off is shown as a diamond. The AUC was 0.64.

[0543] FIG. 92 A shows the Kaplan-Meier survival analysis of the SEQ ID NO:63 marker of the 599 patient samples that passed the quality control filter using the optimized methylation cut-off value (5.79%). FIG. 92B shows the Kaplan-Meier survival analysis of said marker using the predefined median methylation value as a cut-off, the p-value was 0.018. FIG. 92C shows the ROC curve analysis of said marker after 5 years of follow-up. The median methylation cut-off is marked as a triangle, and the optimized methylation cut-off is shown as a diamond. The AUC was 0.60.

[0544] FIG. 93 A shows the Kaplan-Meier survival analysis of the SEQ ID NO:35 marker of the 598 patient samples that passed the quality control filter using the optimized methylation cut-off value (36.77%). FIG. 93B shows the Kaplan-Meier survival analysis of said marker using the predefined median methylation value as a cut-off, the p-value was 0.059. FIG. 93C shows the ROC curve analysis of said marker after 5 years of follow-up. The median methylation cut-off is marked as a triangle, and the optimized methylation cut-off is shown as a diamond. The AUC was 0.61.

[0545] FIG. 94 A shows the Kaplan-Meier survival analysis of the ABHD9 marker of the 592 patient samples that passed the quality control filter using the optimized methylation cut-off value (28.41%). FIG. 94B shows the Kaplan-Meier survival analysis of said marker using the predefined median methylation value as a cut-off, the p-value was 0.018. FIG. 94C shows the ROC curve analysis of said marker after 5 years of follow-up. The median methylation cut-off is marked as a triangle, and the optimized methylation cut-off is shown as a diamond. The AUC was 0.58.

[0546] FIG. 95 A shows the Kaplan-Meier survival analysis of the CCND2 marker of the 604 patient samples that passed the quality control filter using the optimized methylation cut-off value (2.22%). FIG. 95B shows the Kaplan-Meier survival analysis of said marker using the predefined median methylation value as a cut-off, the p-value was 0.22. FIG. 95C shows the ROC curve analysis of said marker after 5 years of follow-up. The methylation cut-off is marked as a triangle, and the optimized methylation cut-off is shown as a diamond. The AUC was 0.61.

### Evaluation of Markers on Clinical Subsets of the Patients

[0547] Several clinical prognostic factors are commonly used for assessing prostate cancer. Histological analysis of the tumor with quantification of the tumor differentiation state using the Gleason grading system is a particularly important prognostic indicator in current clinical practice. The analysis was continued by determining whether the markers could improve Gleason analysis by subdividing patients within a Gleason category. We also investigated whether the markers could add information to other prognostic indicators, such as nomogram risk estimation (Han et al. 2003) and disease stage.

[0548] For these analyses, we used Kaplan-Meier analysis to determine whether our markers are still informative on population sub-groups, and Cox regression analysis to determine whether the markers provide information independent of the prognostic clinical variables. Gleason score (using Charite Gleason calls) was divided into three groups (6 or lower, 7, and 8 through 10), stage was divided into two groups (T2/organ-confined and T3/non-organ confined), PSA was divided into four groups (0 to 4 ng/ml, 4 to 10 ng/ml, 10 to 20 ng/ml, and greater than 20 ng/ml), and nomogram estimation of 5 year PSA-free survival was divided into two groups (90 to 100% and 0 to 89%).

### PITX2

[0549] With Cox regression modeling, PITX2 is a valuable prognostic marker independent of other clinical-prognostic information (Table 18). In other words, PITX2 methylation adds more information to Gleason than either PSA or disease stage. The hazard ratio for PITX2 is 2.2. In the survival analysis of sub-groups, PITX2 has the potential to be a significant marker for all prostate cancer patients. It is particularly interesting to see strong separation within the patient sub-group with organ-confined disease (FIG. 96). Patients with organ-confined disease (T2) should be cured by surgery. Those that are not cured by surgery must have had some cells leave the prostate before surgery, and therefore had tumor cells with aggressive characteristics early in the development. PITX2 can separate the T2 group into a hypomethylated group with a very small chance for recurrence (−5%) and a hyper-methylated group with a prognosis more like T3 patients.

[0550] FIG. 96 shows the survival analysis of PITX2 performance on sub-populations based on stage. The upper left plot shows the performance of disease stage as a prognostic marker. The upper right plot shows the performance of PITX2 on pT2 patients. The lower left plot shows the performance of PITX2 on pT3 patients.

[0551] PITX2 is also capable of stratifying patients within Gleason sub-categories. FIG. 97 shows that survival analysis on low Gleason patients (Score 5 or 6) and high Gleason patients (Score 8, 9, or 10) results in low p values. Patients with high Gleason scores are currently candidates for clinical trials on post-surgical adjuvant therapies. But the PITX2 values suggest that this is not a uniform group. PITX2 hypomethylated, high Gleason patients have 85% probability of disease free survival at ten years, while hypermethylated high Gleason patients have a very low chance (−35%). These patients with high likelihood for disease recurrence are the patients who should be selected for adjuvant therapy or clinical trials.

[0552] FIG. 97 shows the survival analysis of PITX2 performance on sub-populations based on Gleason score categories. The upper left plot shows the performance of Gleason score as a prognostic marker. Gleasson 5 and 6 patients are marked A, Gleason 7 patients are marked B, and Gleason 8, 9, and 10 patients are marked C. The upper right plot shows the performance of PITX2 on Gleason 5 and 6 patients. The lower left plot shows the performance of PITX2 on Gleason 7 patients. The lower right plot shows the performance of PITX2 on Gleason 8, 9, and 10 patients.

[0553] Prostate cancer nomograms are created based on large cohorts of patients. They mathematically combine information from stage, Gleason, and pre-operative PSA levels into one prognostic indicator. As FIG. 98 shows, the nomogram by itself is very strong. But PITX2 is capable of further sub-dividing the patients.

[0554] FIG. 98 shows the survival analysis of PITX2 performance on sub-populations based on nomogram risk estimation. The upper left plot shows the performance of the nomogram as a prognostic marker. The upper right plot shows the performance of PITX2 on patients with a 90% chance of 5 year PSA-free survival according to the nomogram. The lower left plot shows the performance of PITX2 on patients with less than 90% chance of 5-year PSA-free survival according to the nomogram.

### SEQ ID NO:63

[0555] With Cox regression analysis, SEQ ID NO:63 is a valuable prognostic marker independent of other clinical prognostic information (Table 19). The hazard ratio is 2.9. In the survival analysis of sub-groups, SEQ ID NO:63 seems to have the potential to be a significant marker for some sub-groups, such as high Gleason patients (FIG. 99) and patients with poor nomogram-based prognosis (FIG. 100).

[0556] FIG. 99 shows the survival analysis of SEQ ID NO:63 performance on Gleason score 8, 9, and patients.

[0557] FIG. 100 shows the survival analysis of SEQ ID NO:63 performance on patients with less than 90% chance of 5-year PSA-free survival according to the nomogram.

[0558] SEQ ID NO:35 is a marker for some sub-groups, such as pT2 patients (FIG. 101).

### Discussion

[0559] PITX2, SEQ ID NO:35, and GPR7 all show significant prognostic information when the median methylation level is used as a cut-off. Setting the methylation cut-off even higher than the median improves the performance of these three markers. This has the effect of decreasing the marker positive group and increasing the specificity of the test. The median methylation level is not optimal for SEQ ID NO: 63. Instead, a lower cut-off more clearly separates the good and bad prognosis groups for this marker. The optimized methylation cut-off values for these four markers all fall in the range for which their respective assays are technically well suited.

[0560] The patients whose samples were analyzed in this study are representative of the population who would be targeted for a prostatectomy test. Therefore, it is possible to speculate on the information these markers could provide for future patients. PITX2, for example, has a sensitivity of around 60% and a specificity of 70%. In the Kaplan-Meier analysis in FIG. 90, the marker positive group has approximately three time the risk of recurrence after ten years that the marker negative group has. In FIG. 97, Gleason 8-10 patients that are positive for PITX2 have a 65% chance for PSA recurrence in 10 years. In contrast, the Gleason 8-10 patients who were marker negative had only a 15% chance of PSA relapse. The addition of the methylation marker information to the Gleason stratification will allow clinicians to identify a poor prognosis sub-group who can most benefit from adjuvant therapy. If these methylation markers are incorporated into the patient selection procedure for adjuvant therapy clinical trials, clinicians may begin to see a clear benefit to the addition of early adjuvant treatments for poor prognosis patients.

[0561] In addition to adding information to Gleason, PITX2 and some of the other markers can also stratify patients with organ-confined disease. Patients with disease that is truly confined to the organ will be cured by complete removal of the organ. Patients with disease that appears to be confined to the organ, but have undetected micrometastases, will not be cured by surgery. These two groups of patients, both with small operable lesions, have tumors with very different capacities for metastases. PITX2 and some of the other markers seem to be detecting these underlying differences in basic tumor aggressiveness.

[0562] The ability of these markers to add information to currently used markers is essential. Gleason and staging already provide significant prognostic information, a new test that would not replace but complement these traditional sources of information is both more valuable and more likely to be readily adopted in clinical practice.

[0563] In the analysis of the markers on sub-groups of patients, the markers often seemed strongest on patients with poor prognosis based on traditional clinical variables. Gleason 8-10 patients and patients with low nomogram probability for PSA free survival are well stratified by the present markers into good and poor prognosis groups. For a prostatectomy test, these are the ideal patients to target, since the test would be used to select a group of poor prognosis patients who can most benefit from adjuvant therapy. For T3 patients (non-organ-confined disease), the marker SEQ ID NO: 63 is preferred. Overall, this analysis demonstrates that the present markers are especially well suited for identifying poor prognosis patients.

### Example 6

### Test of Assays on Paraffin Embedded Tissue

[0564] In the following analysis, methylation within paraffin embedded prostate tissue samples was analysed by means of the assays shown in Table 12 for the analysis of SEQ ID NO: 19, 35, 37 and 63. This was then compared to the same measurement carried out upon the frozen samples described in Example 2.

### Samples

[0565] The samples were paraffin embedded prostatectomy samples or fresh frozen tissues as described in Example 3. The samples were sectioned, the tissue was lysed, the DNA was then extracted and bisulfite converted.

[0566] 309 paraffin embedded samples were available, of these all samples with at least 1 ng of DNA per PCR were included in the analysis, with between 1 and 10 ng of DNA per PCR being used.

### Reagents:

### 1×Taqman PCR Buffer A

[0567] 0.25 mM dNTPs
900 nM each primer
300 nM probe
1 unit AmpliTaq Gold
Thermal Cycling profile:

### Step 1. 95° C.->10 min (Taq Activation)

[0568] Repititions: 1

### Step 2. 95° C.->15 s (Denaturation)

[0569] 63.0° C.->1 min (Annealing/Extension)

[0570] Repititions: 50

[0571] The following categories were compared
[0572] 1. Early biochemical relapse (PSA relapse after prostatectomy in less than 24 months) vs. no biochemical relapse (no significant rise in PSA during at least 4 years of PSA monitoring after surgery)
[0573] 132 samples were available in the non-relapse group and 59 samples available in the early relapse group.
[0574] 2. High Gleason (score=8-10) vs Low Gleason (Score=2-6 with no grade 4 or 5 component) 59 samples were available in the high Gleason group and 64 samples available in the low Gleason group.

### Results

[0575] Results are shown in FIGS. 102 to 125, and were calculated using the Wilcoxon test as described above.

[0576] FIG. 102 shows the detected amplificate in both frozen and PET samples in the early biochemical relapse vs. no biochemical relapse comparisons using the assay of SEQ ID NO:19 shown in Table 12.

[0577] FIG. 103 shows the detected amplificate in both frozen and PET samples in the early biochemical relapse vs. no biochemical relapse comparisons using the assay of SEQ ID NO:63 shown in Table 12.

[0578] FIG. 104 shows the detected amplificate in both frozen and PET samples in the early biochemical relapse vs. no biochemical relapse comparisons using the assay of SEQ ID NO:35 shown in Table 12.

[0579] FIG. 105 shows the detected amplificate in both frozen and PET samples in the early biochemical relapse vs. no biochemical relapse comparisons using the assay of SEQ ID NO:37 shown in Table 12.

[0580] FIG. 106 shows the detected amplificate in PET samples only in the early biochemical relapse vs. no biochemical relapse comparisons using the assay of SEQ ID NO:19 shown in Table 12.

[0581] FIG. 107 shows the detected amplificate in PET samples only in the early biochemical relapse vs. no biochemical relapse comparisons using the assay of SEQ ID NO:63 shown in Table 12.

[0582] FIG. 108 shows the detected amplificate in PET samples only in the early biochemical relapse vs. no biochemical relapse comparisons using the assay of SEQ ID NO:35 shown in Table 12.

[0583] FIG. 109 shows the detected amplificate in PET samples only in the early biochemical relapse vs. no biochemical relapse comparisons using the assay of SEQ ID NO:37 shown in Table 12.

[0584] FIG. 110 shows the detected amplificate in frozen samples only in the early biochemical relapse vs. no biochemical relapse comparisons using the assay of SEQ ID NO:19 shown in Table 12.

[0585] FIG. 111 shows the detected amplificate in frozen samples only in the early biochemical relapse vs. no biochemical relapse comparisons using the assay of SEQ ID NO:63 shown in Table 12.

[0586] FIG. 112 shows the detected amplificate in frozen samples only in the early biochemical relapse vs. no biochemical relapse comparisons using the assay of SEQ ID NO:35 shown in Table 12.

[0587] FIG. 113 shows the detected amplificate in frozen samples only in the early biochemical relapse vs. no biochemical relapse comparisons using the assay of SEQ ID NO:37 shown in Table 12.

[0588] FIG. 114 shows the detected amplificate in both frozen and PET samples in the High Gleason vs. Low Gleason comparisons using the assay of SEQ ID NO:19 shown in Table 12.

[0589] FIG. 115 shows the detected amplificate in both frozen and PET samples in the High Gleason vs. Low Gleason comparisons using the assay of SEQ ID NO:63 shown in Table 12.

[0590] FIG. 116 shows the detected amplificate in both frozen and PET samples in the High Gleason vs. Low Gleason comparisons using the assay of SEQ ID NO:35 shown in Table 12.

[0591] FIG. 117 shows the detected amplificate in both frozen and PET samples in the High Gleason vs. Low Gleason comparisons using the assay of SEQ ID NO:37 shown in Table 12.

[0592] FIG. 118 shows the detected amplificate in PET samples only in the High Gleason vs. Low Gleason comparisons using the assay of SEQ ID NO:19 shown in Table 12.

[0593] FIG. 119 shows the detected amplificate in PET samples only in the High Gleason vs. Low Gleason comparisons using the assay of SEQ ID NO:63 shown in Table 12.

[0594] FIG. 120 shows the detected amplificate in PET samples only in the High Gleason vs. Low Gleason comparisons using the assay of SEQ ID NO:35 shown in Table 12.

[0595] FIG. 121 shows the detected amplificate in PET samples only in the High Gleason vs. Low Gleason comparisons using the assay of SEQ ID NO:37 shown in Table 12.

[0596] FIG. 122 shows the detected amplificate in frozen samples only in the High Gleason vs. Low Gleason comparisons using the assay of SEQ ID NO:19 shown in Table 12.

[0597] FIG. 123 shows the detected amplificate in frozen samples only in the High Gleason vs. Low Gleason comparisons using the assay of SEQ ID NO:63 shown in Table 12.

[0598] FIG. 124 shows the detected amplificate in frozen samples only in the High Gleason vs. Low Gleason comparisons using the assay of SEQ ID NO:35 shown in Table 12.

[0599] FIG. 125 shows the detected amplificate in frozen samples only in the High Gleason vs. Low Gleason comparisons using the assay of SEQ ID NO:37 shown in Table 12.

1. A method for providing a prognosis of a subject with a prostate cell proliferative disorder comprising:
obtaining a biological sample from a subject;
determining the expression status of at least one gene or genomic sequence selected from the group consisting PITX2, HIST2H2BF, SEQ ID NO:63, GPR7, SEQ ID NO:35 and FOXL2 in said sample; and
determining therefrom the prognosis of said subject whereby expression is indicative of prognosis of a prostate cell proliferative disorder.

2. The method of claim 1, wherein determining the prognosis comprises consideration of at least one further prognostic variable.

3. The method of claim 2, wherein said at least one further prognostic variable is selected from the group consisting of nomogram, PSA level and Gleason score.

4. The method of claim 1, wherein said prognosis is determined in terms of at least one of the group consisting of overall patient survival, disease- or relapse-free survival, tumor-related complications and rate of progression of tumour.

5. The method of claim 1, further comprising:
determining, based on the prognosis, a suitable treatment for said subject.

6. The method of claim 1, wherein said prostate cell proliferative disorder is a prostate carcinoma or prostate neoplasm.

7. The method of claim 1, wherein the at least one gene is PITX2.

8. The method of claim 1, wherein said genomic sequence is SEQ ID NO:35.

9. The method of claim 1, wherein said genomic sequence is SEQ ID NO:63.

10. The method of claim 6, wherein said disorder is T2 prostate carcinoma.

11. The method of claim 6, wherein said disorder is prostate carcinoma with a Gleason score of eight or higher.

12. The method of claim 7, wherein said subject has a poor prognosis based on nomogram score.

13. The method of claim 1, wherein the sample is selected from the group consisting of cells or cell lines, histological slides, biopsies, paraffin-embedded tissue, bodily fluids, ejaculate, urine, blood, and combinations thereof.

14. The method of claim 1, wherein the expression is determined by measuring the level of at least one of mRNA, cDNA or polypeptide.

15. The method of claim 14, wherein the expression is determined by use of at least one technique selected from the group consisting of Northern blot analysis, reverse transcriptase PCR, real-time PCR, RNAse protection, and microarray analysis.

16. The method of claim 1, wherein said expression is determined by determining the level of methylation or methylation status of one or more CpG positions within said at least one gene or genomic sequence.

17. The method of claim 16, comprising contacting genomic DNA isolated from a biological sample obtained from the subject, with at least one reagent, or series of reagents that distinguishes between methylated and non-methylated CpG dinucleotides within at least one target region of the genomic DNA, wherein the target region comprises, or hybridizes under stringent conditions to a sequence of at least 16 contiguous nucleotides of at least one gene or sequence selected from the group consisting of PITX2, SEQ ID NO:63, GPR7 and SEQ ID NO:35, wherein said contiguous nucleotides comprise at least one CpG dinucleotide sequence, and whereby providing a prognosis of prostate cell proliferative disorders is, at least in part, afforded.

18. The method of claim 17, comprising:
isolating genomic DNA from a biological sample taken from said subject;
treating the genomic DNA, or a fragment thereof, with one or more reagents to convert 5-position unmethylated cytosine bases to uracil or to another base that is detectably dissimilar to cytosine in terms of hybridization properties;
contacting the treated genomic DNA, or the treated fragment thereof, with an amplification enzyme and at least two primers comprising, in each case a contiguous sequence at least 18 nucleotides in length that is complementary to, or hybridizes under moderately stringent or stringent conditions to a sequence selected from the group consisting of SEQ ID NOS:133, 134, 261, 262, 189, 190, 317, 318, 101, 102, 229, 230, 962-965. and complements thereof, wherein the treated DNA or a fragment thereof is either amplified to produce one or more amplificates, or is not amplified;
determining, based on the presence or absence of, or on the quantity or on a property of said amplificate, the methylation state of at least one CpG dinucleotide sequence of at least one gene or sequence selected from the group consisting of PITX2, SEQ ID NO:63, GPR7 and SEQ ID NO:35, or an average, or a value reflecting an average methylation state of a plurality of CpG dinucleotide sequences of at least one gene or sequence selected from the group consisting of PITX2, SEQ ID NO:63, GPR7 and SEQ ID NO:35; and
determining from said methylation state the prognosis of said subject.

19. A treated nucleic acid derived from SEQ ID NOS:961, 35, 63 and 19, wherein the treatment is suitable to convert at least one unmethylated cytosine base of the genomic DNA sequence to uracil or another base that is detectably dissimilar to cytosine in terms of hybridization.

20. A nucleic acid, comprising at least 16 contiguous nucleotides of a treated genomic DNA sequence selected from the group consisting of SEQ ID NOS:133, 134, 261, 262, 189, 190, 317, 318, 101, 102, 229, 230, 962-965, and sequences complementary thereto, wherein said nucleic acid is not identical or complementary to SEQ ID NOS:961, 35, 63 and 19, wherein the treatment is suitable to convert at least one unmethylated cytosine base of the genomic DNA sequence to uracil or another base that is detectably dissimilar to cytosine in terms of hybridization.

21. The nucleic acid of any one of claims 19 and 20, wherein the contiguous base sequence comprises at least one CpG, TpG or CpA dinucleotide sequence.

22. The nucleic acid of any of claim 21, wherein the treatment comprises use of a reagent selected from the group consisting of bisulfite, hydrogen sulfite, disulfite, and combinations thereof.

23. An oligomer, comprising a sequence of at least 9 contiguous nucleotides that is complementary to, or hybridizes under moderately stringent or stringent conditions to a treated genomic DNA sequence selected from the group consisting of SEQ ID NOS:133, 134, 261, 262, 189, 190, 317, 318, 101, 102, 229, 230, 962-965, and sequences complementary thereto, wherein said nucleic acid is not identical or complementary to SEQ ID NOS:961, 35, 63 and 19.

24. The oligomer of claim 23, comprising at least one CpG, CpA or TpG dinucleotide.

25. A kit for use in for use in providing a prognosis of a subject with a prostate cell proliferative disorder, comprising: a means for detecting the polypeptides of a gene or genomic region selected from the group consisting of PITX2, HIST2H2BF, SEQ ID NO:63, GPR7, FOXL2 and SEQ ID NO:35.

26. The kit of claim 25, comprising: (a) a means for detecting the polypeptides of a gene or genomic region selected from the group consisting of PITX2, HIST2H2BF, SEQ ID NO:63, GPR7, FOXL2 and SEQ ID NO:35; (b) a container suitable for containing the said means and a biological sample of the patient comprising said polypeptides, wherein the means can form complexes with the polypeptides; (c) a means to detect the complexes of (b); and optionally (d) instructions for use and interpretation of the kit results.

27. A kit for use in providing a prognosis of a subject with a prostate cell proliferative disorder, comprising: a means for measuring the level of mRNA transcription of a gene or genomic region selected from the group consisting of PITX2, HIST2H2BF, SEQ ID NO:63, GPR7, FOXL2 and SEQ ID NO:35.

28. The kit of claim 27, comprising: (a) a means for measuring the level of mRNA transcription of a gene or genomic region selected from the group consisting of PITX2, SEQ ID NO:63, GPR7 and SEQ ID NO:35; (b) a container suitable for containing the said means and a biological sample of the patient comprising mRNA of a gene or genomic region selected from the group consisting of PITX2, SEQ ID NO:63, GPR7 and SEQ ID NO:35, wherein the means are able to hybridize to the transcription products of said gene; (c) a means for detecting the complexes of (b); and optionally (d) instructions for use and interpretation of the kit results.

29. A kit comprising:
at least one of a bisulfite reagent; and
at least two nucleic acid molecules comprising, in each case a contiguous sequence at least 16 nucleotides that is complementary to, or hybridizes under moderately stringent or stringent conditions to a sequence selected from the group consisting of SEQ ID NOS:133, 134, 261, 262, 189, 190, 317, 318, 101, 102, 229, 230, 962-965 and complements thereof.

30. A composition comprising the following:
a nucleic acid comprising a sequence at least 18 bases in length of a segment of the chemically pretreated genomic DNA according to one of the sequences taken from the group consisting of SEQ ID NOS: 133, 134, 261, 262, 189, 190, 317, 318, 101, 102, 229, 230, 962-965 and sequences complementary thereto, and
a buffer comprising at least one of the following substances: magnesium chloride, dNTP, of taq polymerase, an oligomer, in particular an oligonucleotide or peptide nucleic acid (PNA)-oligomer, said oligomer comprising in each case at least one base sequence having a length of at least 9 contiguous nucleotides which is complementary to, or hybridizes under moderately stringent or stringent conditions to a pre-treated genomic DNA according to one of the SEQ ID NOS:133, 134, 261, 262, 189, 190, 317, 318, 101, 102, 229, 230, 962-965 and sequences complementary thereto.

31. (canceled)

The application's sequence listing, which the Patent Office published only in electronic form, follows.

SEQUENCE LISTING (1006 sequences)

SEQ ID NO: 1 - DNA, 7572 bp, Homo Sapiens
tgcatgagcacggatgccacgagggtatccagcgagtgggaagggagtcgccctacatgttttcacatcgatttgtaaaactgttttgaaagggtatttctagatccatttgttccaaatgcagcaaaattcatccgatatcgctcacaatgcatgcacgggttatcttacatgtaatagccatcgtattaaccaacccagctgatactgagatggtgaatggggcgggggagcagggaggaatatgtcgcgcatgaaaaactccgggtgtaaaagtcaatgcagaactcactccccgaggaaccgaaaaagacattcacgactctcaagtggagagaggatagaaagtcaagtggcgggggtcgcgaccagtgatcgggatttcagtctgatctcagtacccagcggaacaggaccataacctaaagaaatgagctttttccggagcaaagagcggccccgatttcaaagtagaaaaaataaactgcttgggggtggaagatggcgaggggcggggggcggggagggaggcgggtcgcggcgctggctccggggtccgcggcacggcctcctctgccgcgctgcccagggcccggaccctgcccggcgctgcgcccaccgcgagggtgccagacccgccgcgccgccgccgcgctctcccagccgcggccccctcccccgccgcttcctcttgctctcccagccccttcccccacgtgtggatgacgtcaaaattccgcgaaaaagccgcgtggtggctccccgagcggaggcgcgattccgccgcccagcggccccctcccgggggcgcctggagggggagaagggcggaggcggccggttccttctcctcccgggaggcaggaccccccgacgccgaccgccggacgccccccgccccaaagcttattggaaaattcacttttgtaaagcaaatgtatttccagagctattttcggccgcgtgaggcgtgtcctaagctgaatcagacaggaagagggggaagttcgggtcttttaattttttttttttccgaagggaggggagtgagatgctaggtgggtgacagacggcaggcgctcgccttcttaactcacgcctgtcgcatctgccgcctcagtaatccagccccgtccaagccgaaattcgccgaagggagtgcggatgcacaggcctggcggactctgcccccctccagaacgcagcggcccagcgccccggcgggcgcggctgcgaccagagggtcccggaagcgagtgaacacctgcaatcgcactgcccgtccccacccaccctgctcccccgtgctctccgcttcccgacgttttcctcttctccttgtccgcatttttctactttgcctgcactccctccttcctcttgatgtgcctcctatgtgtcccctcggatttatgtgtcccctcgcattttgccagtcgggttttcggttttgattgaccgtccatccctccacggagaaacacaaacacagctccactctttgggggagccgaggggaaggcagtggctcccatttctgagcctgaactcagtcactacccgctccccacctggcctaggcgcccctgcgcggagaaggcgggactcgaactcgcgctgctcccgggccttgagccgaccgcggaatcacctggctgggaggcatcctccaggtaagcttgggagtatgtgtgcttagtgctgcaggctcctgcagaaaagtgcctataaacacccaacaccctgctgcaccctccacctccaggctttgtacactttccaaccgaaactccaaaacgctagcgtagagggtggggagccggccggaaaaagaataaaagtccaataaaactggcgttcgctaaagtttatcaccagtcctacatgggatatatatatatgtatttttttttccgtgaagggtgaaaaggagataaggaagaaccaacaatctaccccctcccgccgccccccacccccgcgccacggtgatcagtttggacttcaaagccagagcacaggctcttgcgctttttcttgaaaccgaagtctacactgaaagaaagtgtgcacttttgcctagaaggcaacatgcgttttcccgcgtgctaggtggagtgcattttaacaagacattagggttttaacacatggctggagtggcgaccaaaagggaaaactcagtttccagtccaagcctcctagagacattcctgccaacctccgcaccctctcacgccccaccccacgtgtgagagtctgcaaaaccaccggggattggattcgatggcgagcttcacgctcgggaacagtcagtaatcggaaggggaagtggacaggggaacttcaagaggcgagcctgccacgcgggaagcgcccgaacttgcgggtctccatgaatgcagagggcgccgggaagggggggcatccggccgcgaccctctctgcccctcccattcgctgcccccctccccgctggaatttctctgtaaagcaagacggagtagggggagggggagagggaaggggcgagagggccctcggctcactcccgagacgtgaggactcgccacccaggcattctcctcggggtgggctgggccccgggacgaccacccgcttcttcctcgcccccgctgcccccacttcgggagacccagagctctggatgcctttccccggagaagggggggtgtgcggagtcggggtggaagagaccttgctcgcagagctatatcaagtgatgtccagaggctgggagccccggcggcctctgtcccttgcctgtcgggttagatttatactttaaaaatacctcccgccctccctccttctctcgcctctccccgctgcaactttctttgatccgctcaaaggtggcttaggtgaaattggagtaattcccttatgggggtcttaaaatgtaagtgaatgtccttatccggggtgactcaaaagcttaagtcgggaagcccaacgtgactaaaaccaataggtgattgttcggggccgactgtgtgcgggtgtacacggtattcggcccgggtgtcatccgcggcgctggactgtttcattttgagtttgcaacttgggtttttcagcgagctttttttcttcctgaaagctaatggcttccacagcaattagacattttcctcgcccgccccttccctcccctttctttacatataggagatgggatactcattcccgctgctattgataaggtcggaggcggccgggcctctccccagctttcgcccgccccagcgcccgctctccctccgccctcccttggcttccttttgatgtagtggggaacgcgtcctactaaaaaaaaaaaaaaaaaaaaaaaaaaaaagtaatctgcccggtaacaatcagcgcgcagtagcaggagccccagagctattggctatgcaaatagagggaggggagacggcgccccaaactcttcctcacccttttaaagcgatatcccctcctttcccccccaccaccccttccgccccaccctcgtttaaagaggctggctccggggcctgagttaatcgcttgcacctctagtttattcgctcccctcctccgccttgcagggaacctagtgtacggctcacccagcccgcgccccaccccgccttgctggctctccgcgcccctgcccgggccccctctctcggtgagggaggcactcagtcggcctcggtgtgcccagagagctcgagccacgccatgcccgctgcacgtgccagcttggccagcacatcagggcgctggtctctccccttcctcctggagtgaaatacaccaaagggcgcggtgggggtggggggtgacgggaggaaggaggtgaagaaacgccaccagatcgtatctcctgtaaagacagccttgactcaagcatgcgttagagcacgtgtcagggccgaccgtgctggcggcgacttcaccgcagtcggctcccagggagaaagcctggcgagtgaggcgcgaaaccggaggggtcggcgaggatgcgggcgaaggaccgagcgtggaggcctcatgcctccggggaaaggaaggggtggtggtgtttgcgcagggggagcgagggggagccggacctaatccctcactcgccccctccccctcccgggccatttcctagaaagctgcatcggtgtggccacgctcagcgcagacacctcgggcggcttgtcagcagatgcaggggcgaggaagcgggtttttcctgcgtggccgctggccgcgggggaaccgctgggagccctgcccccggcctgcggcggccctagacgctgcaccgcgtcgccccacggcgcccgaagagcccccagaaacacgatggtttctgctcgaggatcacattctatccctccagagaagcaccccccttccttcctaatacccacctctccctccctcttcttcctctgcacacactctgcaggggggggcagaagggacgttgttctggtccctttaatcggggctttcgaaacagcttcgaagttatcaggaacacagacttcagggacatgacctttatctctgggtatgcgaggttgctattttctaaaatcaccccctcccttatttttcacttaagggacctatttctaaattgtctgaggtcaccccatcttcagataatctaccctacattcctggatcttaaatacaagggcaggaggattaggatccgttttgaagaagccaaagttggagggtcgtattttggcgtgctacacctacagaatgagtgaaattagagggcagaaataggagtcggtagttttttgtgggttgccctgtccggggcccctggcatgcagggctggatggagggagaggggtggggggtggcgggggaccgcgtttgaagttgggtcgggccagctgctgttctccttaataacgagaggggaaaaggagggagggagggagagattgaaaggaggaggggaggaccgggaggggaggaaaggggaggaggaaccagagcggggagcgcggggagagggaggagagctaactgcccagccagcttgcgtcaccgcttcagagcggagaagagcgagcaggggagagcgagaccagttttaaggggaggaccggtgcgagtgaggcagccccgaggctctgctcgcccaccacccaatcctcgcctcccttctgctccaccttctctctctgccctcacctctcccccgaaaaccccctatttagccaaaggaaggaggtcaggggaacgctctcccctccccttccaaaaaacaaaaacagaaaaacctttttccaggccggggaaagcaggagggagaggggccgccgggctggccatggagctgctgtgccacgaggtggacccggtccgcagggccgtgcgggaccgcaacctgctccgagacgaccgcgtcctgcagaacctgctcaccatcgaggagcgctaccttccgcagtgctcctacttcaagtgcgtgcagaaggacatccaaccctacatgcgcagaatggtggccacctggatgctggaggtaggtcggggggtggcgctcgccaggagccaggacccctccggatgctcgggtccccggccggagccctaaacctgggagagggcaatccccgcgccggcctcccggctcctgtgcgggagtttaccgcgcgccttctggcgagacgcgtggctttatttctgttcctctccagataaactggggaggcagaggggggaggaaaatctgggagaagcgaggctgtcctgggcgggggtaggggagcatcccgcgcgcgtgttcctgcatgtggctgcctcttcttcccacccccctcgcgacctgtcttttgcgaagccgccgcggctgcttgcgctgcggccaggaagagagtcggggcctgaaatcgggaccccgagtagaaaggcaaccccccccaaaaggccagagcaaattcgtcttggcctcaggtccccgcctgtggtcgcgactccgcgctggcacttcaccggggaggtggagggaggagggagaaggagagaaacggggaattcgggagccccggaagtcccattgaagaaacgcgtgtttcaggggaacccaaaagaaccgcttcttgcccctcactccaagtctttgcccagcgagccgtgtgcccacgtatgcacagctctggacctgccgtggtttcgccatgttgctttgcaaactccctttggaaaggctgggaaacgtcgcccgcttaccctcgcaccccattatcccggccaccccacttctaatcgtgccctctcccccaccccccacctcacgaagattacttacagtttggttttccagcttcctcggtgcggagatttgggtggggtaggaagggggggagggggtgtgtgtaggggggataccgggtcacccctgaaggagaggtgggagccccccgtgcctctttccagggctctctgctcccgtctttcccctcgctcgtcaccgcgttccctagtttctgtccttgtgggccgcagccggacactcccgccgcggcgctcaccccttcaagtttcctcccgggatccaaagccccaggggtcggaatacagacctttctggcacccgaaacctctgtttcgggaagcctggctcttctttggggttttcacgccaaaagggcttttctaggatatttcctcgatttttaattattttttgaaaccatccccccctgctccgactccagctgccgaggctgcggcgctcttcctcctctcctccctccccctctcttccccacctctcctcacccgcccccccaaaagcggcccctgggccgcagggacccccccagacattttttccaattgtcgggaatgatagaggaggatctggggatccggatgagaccaagaagtggacccccggagcctccagaatatttttattgattttttgaaaagatgacgaaatccaaaaaagagtgagtgagttagagtgcgcgaaggagtagccaaagggagcgtcgcggagctgccgcggctgctgcgcacttctccgactccccgttttggagctgtagttcacccccttttataggatccctgggaataccaaagcactgatgggctattctgattcactccagtttcctcatctttgttctttattcttatcacgcattctggtcccctccccctcccacaaaaaaaaattaattttttttgtttcgatagattacgcttttttattctttttctcttttgctgatgctatgctctccacccccgccccccaaccctttcccactcccattataggtctgtgaggaacagaagtgcgaagaagaggtcttccctctggccatgaattacctggaccgtttcttggctggggtcccgactccgaagtcccatctgcaactcctgggtgctgtctgcatgttcctggcctccaaactcaaagagaccagcccgctgaccgcggagaagctgtgcatttacaccgacaactccatcaagcctcaggagctgctggtaatgaccggccccttcctcccttcctttctgcgattcccgctttc

SEQ ID NO: 2 - DNA, 3491 bp, Homo Sapiens
gctggtctcgaactcccgacctcaggtgattccccccgccttgatctcccaaagtgaagggattacaaggcgtgaggcaccgcgcccggccgcttctgaataatttcgatcaaaatttatattcgatatttattccaacatacaccacagatttccactgataatccctcctagtaagaaagataagctccatccaggtatctgtgaattggaggctaagtagtcccagcacatcttacatttctttaagactccctttttatcccaaacgttcgtaaattttgtatctgataaagagcatacttccatctaatacaaatatgttccccccttcagatcttctcagcattcgagagatctgtacgcgcgtggctcctcattcctcttccttggcttcccaagcccccagggcgtcgccaggaggaggtctgtgattacaaaccccttctgaaaactccccaggaagcctcccctttttccggagaatcgaagcgctacctgattccaattcccctgcaaacttcgtcctccagagtcgcccgccatcccctgctcccgctgcagaccctctacccacctggatcggcctccgaccgtaactattcggtgcgttgggcagcgcccccgcctccagcagcgcccgcacctcctctacccgaccccgggccgcggccgtggccagccagtcagccgaaggctccatgctgctccccgccgccggctccatgctgctccccgccgcccgctgcctgctctccccctctccgcagccgccgagcgcacgcggtccgccccaccctctggtgaccagccagcccctcctctttcttcctccggtgctggcggaagagccccctccgaccctgtccctcaaatcctctggagggaccgcggtatctttccaggcaaggggacgccgtgagcgagtgctcggaggaggtgctattaactccgagcacttagcgaatgtggcacccctgaagtcgccccaggttgggtctcccccgggggcaccagccggaagcagccctcgccagagccagcgttggcaaggaaggaggactgggctcctccccacctgccccccacaccgccctccggcctccctgctcccagccgcgctcccccgcctgccagcaaaggcgtgtttgagtgcgttcactctgttaaaaagaaatccgcccccgccccgtttccttcctccgcgatacaaccttcctaactgccaaattgaatcggggtgtttggtgtcatagggaaagtatggcttcttcttttaatcataagaaaaagcaaaactattctttcctagttgtgagagccccaccgagaatcgaaatcacctgtacgactagaaagtgtccccctaccccctcaacccttgattttcaggagcgcggggttcactaagtcagaaaccctagttcaaaggattccttttggagagtcggactgctctctccttcccctccccttcccctcctgcgtgtaaaacggctgtctggggcaagggtttctcagacgtgtacattgcctggtataagagcagactctgaaaagatgaggtttatttaatacggacgggggagaattctgcctgtaggcagataggaaaatggggagggagtcattggaaggacggactccattctcaaagtcataattcctagaccagaaaaagtgctcagtgttctagaagcagagttgcacagtgatccaaagaccagcttcaaatactgtcctgtctccttcacacttctcacatttctctttcctactgaaaataccttgcatttttcgtaattataaagggggaagggaatatgagtgccccctgctttataggggttgttgtgagtttaaatgatgtattaatacatataagccttaagaacagtgccacacatcctaagctaatacctgttagctcttgaattatccgctttgaggactggcttgcaatcttgttttgaggcatagaaagaaaatgctttggagcaggacgcggtggctcacacctgtaatcccagcactttgggaagccgaggcgggcagatcacctgaggtcaggagttcgaggccagcttggccaaaatggtgacaccccgtctctactaaaaatacaaaaattagctggccatggtggcgcacgtgtgtaattccagctactcaggaggctgaggcaggagaatcgcttgaacccgggaggcagaggttgcagtaagccgagatcgcgccaccaccctccagcctgggtgacagaatgagactccgactcaaaaaaaaaaaaaaaaatgctttggatagaattatcactattacataaaaggaaagtccggatgcggtggctcacgtctataatcccagcattctgggaggccgagacaggcggatcacctgaggccaggagttcgagacaagcctgaccaacatggcgaaaccctgtctctactaaaaaatacaaaattagcggggcttggtggcgcatgcctgtaatcccagctactcggaggctgatgtaggagaatcgcttgaacccaggagaaggcggaggttgcagtgagccgagatcgcgccattgcactccagcctgggagacaagagcgaaacttggtctcaagaaaaaaagaaagaaagaaagaaagaaagaccaagaagaacttactccctgaaaagattatgggcaccctccaccaccctcacttacaaagaaaagttaaacagcactaaagagtataacaagcgcaaggaggtaaaagttctaatttttcctgtgactactactttttaagcttatcaaaaacatgtactacgttttaaaaaatggattgctcagactttgctgatgccttaagcacatgcttaatctgcctactggataatccagctctgtttaaaagttatatttcaatccctggttgacttaaaccttgtagacccagtatatcttgtacttttagtgtctgcttgattttaaaacatgtagtttttaaaatgaagccaatgaaaacaatttgggatgtcaagtatgttattaaaatctacaatgcattactgtaccatttatattttcctcggggtacctctcaattagctgtgtagcaatgatagggaaaattcaaactatcgataaataaaattattttagtttagtttaagatattttatgatggaggaggaagaaagtggttgccaggatgggagggagggaacacatttccatcactaatacaatggttctttctttttgtttgtttgttttgtgtgtttttttgagatggagtttcgctctgttgcccaggctggagtgaaatggcaccgcacgatctctctcggttcactgcaacctccgcctcccgggttcgagcaattctcctgcctcagcctcccgagtagctgggattacaggcacatgctgccatacccagctaatttttgtattattagtagagacggggtttcactatgttggctaggcttgtctcgaactc

SEQ ID NO: 3 - DNA, 1145 bp, Homo Sapiens
gggcacggaggcactgcgccacccagggcaagacctcgccctctctccagctcctctcccaggatatccaacatcctgtgaaacccagagatcttgctccagccggattcagagaaatttagcgggaaaggagaggccaaaggctgaacccaatggtgcaaggttttacggttcggtcatcctctgtcctgacgccgcggggccagcgggagaagaaagccagtgcgtctctgggcgcaggggccagtggggctcggaggcacaggcaccccgcgacactccaggttccccgacccacgtccctggcagccccgattatttacagcctcagcagagcacggggcgggggcagaggggcccgcccgggagggctgctacttcttaaaacctctgcgggctgcttagtcacagccccccttgcttgggtgtgtccttcgctcgctccctccctccgtcttaggtcactgttttcaacctcgaataaaaactgcagccaacttccgaggcagcctcattgcccagcggaccccagcctctgccaggttcggtccgccatcctcgtcccgtcctccgccggcccctgccccgcgcccagggatcctccagctcctttcgcccgcgccctccgttcgctccggacaccatggacaagttttggtggcacgcagcctggggactctgcctcgtgccgctgagcctggcgcagatcggtgagtgcccgccgcagcctgggcagcaagatgggtgcggggtgctcagcgcggacccggcggcagcccctccggctgagtcggccctgggggactggagtcaagtgagctgtctgcgaagtgcattgggctccggaaagcagggctgggatttgcgctaaaccgttggagaatgtgtctgtggaagcaccatttggttgaaagaaaaagagaaagagaagaaagtttgttgggcaggctgccggcgcgcagttttgggcgaggtcgctagagctgcagcacatggcagaaagtaaccgttctcccggatgcgcacagtcgttgtctggactaacaggctcctgtgcccaagggctcgccaagccccaccgggctgtgtctaggcagggcagagctgggcggggcagagactggggctggaacagggcgagtggc

SEQ ID NO: 4 - DNA, 2221 bp, Homo Sapiens
caatgacgatgtgcagcaggtctcccagagccaagctggcgatcaagatattgggaccgtttcgcatgcacttgttcttgtagataattctcagaagtgtggagttcccgatgatccccagcacgaacacaaggcaggacacaaccgtgttgatgtatttgaaagtctccttgatctcgatgggtccttggcacgggggaggggagatggtgcgtggcggagatcctgccgtcctgtctcctttaggcacctccgcaggtgccaacgaccgcgccagactggcgttggaacccttgggccataaggtcttagtgggtggcgtcattatctctgcggtttgcaaaagcggagtggccctgtcaggcgggaagcctctctcctctccccagatccgcgacaggccgcaggcaagaaccagcgcaaccagggcgcgtccgcacagacttggaggcggctgcatgctgctacctgctccagaaggcgtccggtggccgctccgcagtttcagagcctagagacaagcagaggaaggaagacaggacacttgggtcagctgcccgagccaagtcgctgcaaacgctaataccgcccgcagcctcttcgccagtatccacgctcaaaagtaactcaagtttgcgcgccagtgggaaacttggcgctcatgactcgccagcgcgggtcgaaactccttcctgatgccctctcagctgtttttcttcccccgcgtggccaggaggggtaaataatatgcagtggggcggggcgttctggaaggggtgtgccagggagggaatgatgggggtcccaggcaaagctccgaactctttcacgtaacgggaggaatacagacacgtcttagttaagcgtgcgtgggaaccgcggaattaaggcacctagaggccaagggcttgtgtcaagctctgcattttgccccgcaggggaacctctataccccgcgattgaactcgaaagactcctcccggcggatgaaagccgctactccctggctggctgagctacagctcccgcagcgcgcccaggagtgcgccggagattcggaaacccgcagagacttctcaagtcagcaggaacttggaaaccgctgttccctccaaacggcttcaaacactcgcgctccttcctttacccaacctaattttaatttgccctctctataggcttaatttttatttttttaaaatcccaaactagtaagccaaaccgaagccccagaataaggttcaatcaatgattttaattcaacaccaagcccgaatgtttacctctcggatctgacaaaccagatgcagagcgacgaatggagaccaccttcccgggaggcggaacccagctgggttccagcctgctctgggagaggagcacgcctcccttgagctgcaggcgggtccggctctgacgaaacgctgcgagaatgccagacagtgtagcctccaccgtttgctcggggtctctgctgccatcagacaagtacttttattcattcatcccttcccatcaatcaccgccagactcctcccgcgccttccgaccccgctgcaacctttccccttgggcgatgcctggacagcatcagtagtagttgcccgagggaggggggcagtcctcgtccggggacaggtcccaaaaggctgtttatttgttagagttctacgctcttcaaatgaacccaaatcaagggcaagttatcacgcaccatgtgacacccggcagctccagactagaacaaggctctgcactgaacgtgataattgaacttttaatgccaagtgtcacttttctttcaggtaaatgttccgccgctgtgatatttaaggttggtttgtgggcgctgctctttgctctgcttcattttgccctgaagtttcatttcaagccaacattaaccccaacacggaacagctcgatcttttcttcccaggccctctcactgccccgagagaggattacaagtactcctcattttccccagtacagctcttctcctctcttcctgccacagtatcggtgttaggcaatctcaggcatttttatactgtacctatgacagacttgatgcttatcggagacatgaaaataatcagaaagctgccatgcaaattcaacatgatatttatttaccaggtagagcaatacaataaggtctttctatccattcttgagctccatgtttaccgcagagaggaaaataacagcgactggt

SEQ ID NO: 5 - DNA, 2172 bp, Homo Sapiens
atacggcaggtgctcaataaacgctagctcctattggcattactatcatcactggcgctaatgtattcacttattgtagtgaggcagaacgtctttgtggttacgagtgtgaccaggctgacccactattaagaggtggaggacagggaaggccgtacagtgctccatcacaaggaaaagaggatcagcacgttctcttctgggaagggaaaaaaaaagagaaggaaattgaaagtacacggccgatcttcccccaattacaaagcactggactcacgggagggtatgcgggggactgtgcaagcatacaggggtgtgggggaggaaggccaatgaacagatccactgcaaagggaggggtgatgaggctcatcgtctgaggggaaggggagcagaaaaccttacagactcctgcaccacagtgagaggagagaaaagccatcacacagactgattcaaagcagagagggaaaaggctatggactgagctactgaaaatagggagatgtaaagcactaaactaacccactattaaaaaggagagaaccccaagcgctagagcgacagtctacgaaaaagaggagacagggcaatggactgatagctaaagggacgtgaatccaaacatgaagactgatccactataaaatggtggtggtggtggtggggggggggggtggttttgaaaaaagccatggactgatgcattgggggactggaggaggcaggaatacaaactcaggtagactcactgttaaagagggatgcggaggagtgcggcgccacggattgattcgctacgatgtacaggaagggtggaataaataaggccacggacgggtctcctgaaagttgaggctaggagaaatccaaacactcagatacacctactattaagggggctgaacactgtcacaggctagctccctataagtgggggtgggtggggggcgggtgggggtaggggtagggggaaagcctatggacgagtccaccctaagttggcgtggggaaaaacataagcacgcagaccgatccattatacaacgggagggggaggttaggccacggtcagatccactataagggacgaagggcttgagcaatgccacacgcaggtccaccagccgtggtggtggcggcggggagtcgaacaccagcaggccaccggccaagccacatcctctgcgcgggggcgggaaggatacgtggggtcacggactgggccctccaccctccaggcccagagctcacctgtgtgtagcgtggcggtggcgttggcaatgttggcagctccggggggcgggggctccatacgcggccccaccgccccccaggcctgggttccgaggcggcggtggaggtggtggtggcggtggcggcggcagcacctagaagccgcccctgcgtttccctacagctcacgtgggcccgaggaggaggagcccaatgtcccgccgctcgctgattggccaaagcgctattaatcggccgcaaggcctcgaggggttgggggacgggcccttccctacagagctgtgccgtgattggcgtaaggggaaatgatggaacgctcacggcccctggagtcccgaggaggcgcgttcggccttcacggtgctccacgccgattggctcaaggactgacggactgtgagcaactgaaaaggctcggggcctgtgtcgggggggcgggggtctgcctcacactgattggcttacatgggattgatggaagacagcccccaaggacgggggtgggtggccctgtttttctctgattggcggacgagggacttctagacccctgccaaaacaccaagggggcggtgtcgcacgccatgctgctcagcggaagcagggcttgtatagaaatgggcgtagcagccggcgggagtgggtcggactgggctccgcgtaggcgggcagggcagctctacggttagacaagaccatagagctgggtaaagacgaatttagaacacagcggaggtaggagggcaggatggctgtcaggcacacgaaagagcattgagtggcagaaacgaaatgctttcagagggcagggttgaactgcggccagagttaaaaaggggaggaacctggctctgcattgattggcggtggctggactcaacctagaataggggcccgactagggagagcgggatc

SEQ ID NO: 6 - DNA, 3289 bp, Homo Sapiens
tctgtgtttacgtattatgtgtgtttttccgtttccctccctttttatgagtgagaaaaaaaagcgcctaaattcccaccaacataaaccaatgacatacaatgatgaaattctgttttcacctctgcctgtgacagggaatgcaaaaatagcaagtggcccagttccacgaatccccgcctcctgccctccccgctcctgccgggttggatctctaagaatggaggttagcgcacagcctcgcgcgggccgctcagcccccggacccggcggatgatgtcaggcgacgggagcggccgcggccgggccggggaggccgcggcccaggggagctgggagggagggtggcctcgccaggccgacggcgcgcccggccgcgcggcgttgcctggagacggccctggcggcgctgtgttgctgtaaacagccgcttccctgttactatctatagcaggatctcctggctcccgggcgcggcggctggaggcaggtctgcggtccggctccccgcgcgccccgaactatccgcccgccggcctcatcctgcctcgcccctctccaggtgcccaccgcgggccccgacccccgggcccgaagagtggagaagggaagaccggggctgtgcggggacatgcgtcttcgcgccctggaggtggccagcgcgctggggctgagccccggcagcgtgaccccggctgtcctacgcagcagggcaggagattggggggcgtggcacactctggagcaccttgcctccccaaagccccgtgttccaggacgtggagccgctcctggggtcccagcagtcgaggtattccgcccaggcgcagctggacactgtccttccagcccccgtcctccaccctccaagtccgcgctggaaaatcacccgctgcgggctcccgtaagcacagcttcctggcgggaccgaaccagccctcagcgcagatttgagttccccgcaggaagcacaccccgccttgtcatcccgaactgaccaccctgcccacataaccacacctcgcactccctacccctggggcccagctcagaaccgggcagacacccccttcaaatgtcttcgcacgtaggttttgcacagtgtttatctgctggtgtctcagggatttgacagtttccttaatattcccacacatggccgagaaaaataaataaataaatgcgctgtcttctttaaaaaaataaataaataaagtacccagtatcgtaaagtaggttatcgtattctcttattttggatcctccactttctgcttccaaacgcaggaacagtgctagtattgctcgagcccgagggctggaggttaggggatgaaggtctgcttccacgctttgcactgaattagggctagaattggggatgggggtaggggcgcattccttcgggagccgaggcttaagtcctcggggtcctgtactcgatgccgtttctcctatctctgagcctcagaactgtcttcagtttccgtacaagggtaaaaaggcgctctctgccccatcccccccgacctcgggaacaagggtccgcattgaaccaggtgcgaatgttctctctcattctgcgccgttcccgcctcccctcccccagccgcggcccccgcctccccccgcactgcaccctcggtgttggctgcagcccgcgagcagttcccgtcaatccctccccccttacacaggatgtccatattaggacatctgcgtcagcaggtttccacggcctttccctgtagccctggggggagccatccccgaaacccctcatcttggggggcccacgagacctctgagacaggaactgcgaaatgctcacgagattaggacacgcgccaaggcgggggcagggagctgcgagcgctggggacgcagccgggcggccgcagaagcgcccaggcccgcgcgccacccctctggcgccaccgtggttgagcccgtgacgtttacactcattcataaaacgcttgttataaaagcagtggctgcggcgcctcgtactccaaccgcatctgcagcgagcatctgagaagccaagactgagccggcggccgcggcgcagcgaacgagcagtgaccgtgctcctacccagctctgctccacagcgcccacctgtctccgcccctcggcccctcgcccggctttgcctaaccgccacgatgatgttctcgggcttcaacgcagactacgaggcgtcatcctcccgctgcagcagcgcgtccccggccggggatagcctctcttactaccactcacccgcagactccttctccagcatgggctcgcctgtcaacgcgcaggtaaggctggcttcccgtcgccgcggggccgggggcttggggtcgcggaggaggagacaccgggcgggacgctccagtagatgagtagggggctcccttgtgcctggagggaggctgccgtggccggagcggtgccggctcgggggctcgggacttgctctgagcgcacgcacgcttgccatagtaagaattggttcccccttcgggaggcaggttcgttctgagcaacctctggtctgcactccaggacggatctctgacattagctggagcagacgtgtcccaagcacaaactcgctaactagagcctggcttctccggggaggtggcagaaagcggcaatcccccctcccccggcagcctggagcacggaggagggatgagggaggagggtgcagcgggcgggtgtgtaaggcagtttcattgataaaaagcgagttcattctggagactccggagcggcgcctgcgtcagcgcagacgtcagggatatttataacaaaccccctttcaagcaagtgatgctgaagggataacgggaacgcagcggcaggatggaagagacaggcactgcgctgcggaatgcctgggaggaaaagggggagacctttcatccaggatgagggacatttaagatgaaatgtccgtggcaggatcgtttctcttcactgctgcatgcggcactgggaactcgccccacctgtgtccggaacctgctcgctcacgtcggctttccccttctgttttgttctaggacttctgcacggacctggccgtctccagtgccaacttcattcccacggtcactgccatctcgaccagtccggacctgcagtggctggtgcagcccgccctcgtctcctccgtggccccatcgcagaccagagcccctcaccctttcggagtccccgccccctccgctggggcttactccagggctggcgttgtgaagaccatgacaggaggccgagcgcagag

SEQ ID NO: 7 - DNA, 3812 bp, Homo Sapiens
agcgagaccgcatggtctcacttataagtgggagctgaacaatgagaacacatggtcacatggcggcgatcaacacacactggtgcctgttgagcggggtgctggggagggagagtaccaggaagaatagctaagggatactgggcttaatacctgggtgatgggatgatctgtacagcaaaccatcatggcgcacacacctatgtaacaaacctgcacatcctctacatgtaccccagaacttcaaataaaagttggacggccaggcgtggtggctcacgcctgtaatcccagcactttgggaagccgaggcgtgcagatcacctaaggtcaggagttcgagaccagcccggccaacatggtgaaaccccgtctctactaaaaatacaaaaatcagccagatgtggcacgcacctataattccacctactcgggaggctgaagcagaattgcttgaacccgagaggcggaggttgcagtgagccgccgagatcgcgccactgcactccagcctgggccacagcgtgagactacgtcataaaataaaataaaataacacaaaataaaataaaataaaataaaataaaataaaataaaataaaataaaataaaataaaaaaataaaataaaataaaataaaataaagcaatttcctttcctctaagcggcctccacccctctcccctgccctgtgaagcgggtgtgcaagctccgggatcgcagcggtcttagggaatttccccccgcgatgtcccggcgcgccagttcgctgcgcacacttcgctgcggtcctcttcctgctgtctgtttactccctaggccccgctggggacctgggaaagagggaaaggcttccccggccagctgcgcggcgactccggggactccagggcgcccctctgcggccgacgcccggggtgcagcggccgccggggctggggccggcgggagtccgcgggaccctccagaagagcggccggcgccgtgactcagcactggggcggagcggggcgggaccacccttataaggctcggaggccgcgaggccttcgctggagtttcgccgccgcagtcttcgccaccagtgagtacgcgcggcccgcgtccccggggatggggctcagagctcccagcatggggccaacccgcagcatcaggcccgggctcccggcagggctcctcgcccacctcgagacccgggacgggggcctaggggacccaggacgtccccagtgccgttagcggctttcagggggcccggagcgcctcggggagggatgggaccccgggggcggggagggggggcagactgcgctcaccgcgccttggcatcctcccccgggctccagcaaacttttctttgttcgctgcagtgccgccctacaccgtggtctatttcccagttcgaggtaggagcatgtgtctggcagggaagggaggcaggggctggggctgcagcccacagcccctcgcccacccggagagatccgaacccccttatccctccgtcgtgtggcttttaccccgggcctccttcctgttccccgcctctcccgccatgcctgctccccgccccagtgttgtgtgaaatcttcggaggaacctgtttccctgttccctccctgcactcctgacccctccccgggttgctgcgaggcggagtcggcccggtccccacatctcgtacttctccctccccgcaggccgctgcgcggccctgcgcatgctgctggcagatcagggccagagctggaaggaggaggtggtgaccgtggagacgtggcaggagggctcactcaaagcctcctgcgtaagtgaccatgcccgggcaaggggagggggtgctgggccttagggggctgtgactaggatcgggggacgcccaagctcagtgcccctccctgagccatgcctcccccaacagctatacgggcagctccccaagttccaggacggagacctcaccctgtaccagtccaataccatcctgcgtcacctgggccgcacccttggtgagtcttgaacctccaagtccagggcaggcatgggcaagcctctgcccccggagcccttttgtttaaatcagctgccccgcagccctctggagtggaggaaactgagacccactgaggttacgtagtttgcccaaggtcaagcctgggtgcctgcaatccttgccctgtgccaggctgcctcccaggtgtcaggtgagctctgagcacctgctgtgtggcagtctctcatccttccacgcacatcctcttcccctcctcccaggctggggctcacagacagccccctggttggcccatccccagtgactgtgtgttgatcaggcgcccagtcacgcggcctgctcccctccacccaaccccagggctctatgggaaggaccagcaggaggcagccctggtggacatggtgaatgacggcgtggaggacctccgctgcaaatacatctccctcatctacaccaactatgtgagcatctgcaccagggttgggcactgggggctgaacaaagaaaggggcttcttgtgccctcaccccccttacccctcaggtggcttgggctgaccccttcttgggtcagggtgcaggggctgggtcagctctgggccaggggcccaggggcctgggacaagacacaacctgcacccttattgcctgggacatcaaccagccaagtaacgggtcatgggggcgagtgcaaggacagagacctccagcaactggtggtttctgatctcctggggtggcgagggcttcctggagtagccagaggtggaggaggatttgtcgccagtttctggatggaggtgctggcacttttagctgaggaaaatatgcagacacagagcacatttggggacctgggaccagttcagcagaggcagcgtgtgtgcgcgtgcgtgtgcatgtgtgtgcgtgtgtgtgtgtacgcttgcatttgtgtcgggtgggtaaggagatagagatgggcgggcagtaggcccaggtcccgaaggccttgaacccactggtttggagtctcctaagggcaatgggggccattgagaagtctgaacagggctgtgtctgaatgtgaggtctagaaggatcctccagagaagccagctctaaagcttttgcaatcatctggtgagagaacccagcaaggatggacaggcagaatggaatagagatgagttggcagctgaagtggacaggatttggtactagcctggttgtggggagcaagcagaggagaatctgggactctggtgtctggcctggggcagacgggggtgtctcaggggctgggagggatgagagtaggatgatacatggtggtgtctggcaggaggcgggcaaggatgactatgtgaaggcactgcccgggcaactgaagccttttgagaccctgctgtcccagaaccagggaggcaagaccttcattgtgggagaccaggtgagcatctggccccatgctgttccttcctcgccaccctctgcttccagatggacacaggtgtgagccatttgtttagcaaagcagagcagacctaggggatgggcttaggccctctgcccccaattcctccagcctgctcccgctggctgagtccctggcccccctgccctgcagatctccttcgctgactacaacctgctggacttgctgctgatccatgaggtcctagcccctggctgcctggatgcgttccccctgctctcagcatatgtggggcgcctcagtgcccggcccaagctcaaggccttcctggcctcccctgagtacgtgaacctccccatcaatggcaacgggaaac

SEQ ID NO: 8 - DNA, 1267 bp, Homo Sapiens
atgaatctcgaaagctggattgcagagcaaacgagtgcagtcaattcagccaggggcttgcaagagggagaaagagaaaaagactgtggaatggaaagtttcccaacccaagcctttcccaaggggtagccattctctgttctacagtttagggcttgcatgtgctttttctggagtggaaaaatacataagttataaggaatttaacagacagaaaggcgcacagaggaatttaaagtgtgggctggggggcgaggcggtgggcgggaggcgagcgggcgcaggcggaacaccgttttccaagctaagccgccgcaaataaaaaggcgtaaagggagagaagttggtgctcaacgtgagccaggagcagcgtcccggctcctcccctgctcattttaaaagcacttcttgtattgtttttaaggtgagaaataggaaagaaaacgccggcttgtgcgctcgctgcctgcctctctggctgtctgcttttgcagggctgctgggagtttttaagctctgtgagaatcctgggagttggtgatgtcagactagttgggtcatttgaaggttagcagcccgggtagggttcaccgaaagttcactcgcatatattaggcaattcaatctttcattctgtgtgacagaagtagtaggaagtgagctgttcagaggcaggagggtctattctttgccaaaggggggaccagaattcccccatgcgagctgtttgaggactgggatgccgagaacgcgagcgatccgagcagggtttgtctgggcaccgtcggggtaggatccggaacgcattcggaaggctttttgcaagcatttacttggaaggagaacttgggatctttctgggaaccccccgccccggctggattggccgagcaagcctggaaaatggtaaatgatcatttggatcaattacaggcttttagctggcttgtctgtcataattcatgattcggggctgggaaaaagaccaacagcctacgtgccaaaaaaggggcagagtttgatggagttgggtggacttttctatgccatttgcctccacacctagaggataagcacttttgcagacattcagtgcaagggagatcatgtttgactgtatggatgttctgtcagtgagtcctgggcaaatcctggatttctacactgcgagtccgtcttcctgcatgctccaggagaaagctctcaaagcatgcttcagtggattgacccaaaccgaatggcagcatcggcacactgctcaatgtag

SEQ ID NO: 9 - DNA, 1266 bp, Homo Sapiens
agtcacgtagcttctctattcggagagaagtcggagtactgggatagacccaggaggtcagagcggaaactctgcccgggtgcgtggaaccggagtccccggtgcgcggcgccaggtactcacctgtatggctgagcgccaggaccgcgcacagcagcagggcgcgggcgagcatcgcagcggcgggcagggcgcggcgcgggggtaggctttgctgtctgagggcgtctggctgtggagctgaaggaggcgctgctgaggagttcctggacgtgctcctgacgctcactgcaagtcgtatgacaattggtcgctaaccgagagaaccttcctttttataagactgaaaaccaagcccatgtgacgaaatgactgtttctttccgccttttcgtaccccccacaaatttttccctcctctccccttaaaaaaattgcgtaagcccggtgggggcagggttttttacccacggaaatgagaaaatcggaaacccaggaagctgccccaatttgggagcagagggggtagtccccactctcctgtctgatccctccctctcctccccgagttccaccgccccaggcgcacaggtttccgccagatgtcttttcttcttcgcagtctttgcccgagcgcttccgagagccagttctggactgatcgccttggatgggataccgggggagggcagaaggacacttggcttcctctccaggaatctgagcggccctgaggtccgggggcgcagggaatcccctctcccgccgccgccgccgtgtctggtctgtacgtctttagagggtcgaggaagtcacgtcgggacagactggggcgagtaaggttaagaaaggctgacatgttttatgttttagtgacgacgcttaataggctgtatatctgctctatatgcagcacatacatacatagctttttaaaaaactcttattttgtggaatgaaatagctaccttcagtgtacatagctgtaatttatctttgtagctaagttgctttcaacagaagaaatactgttctccgtaccttcaccccctccttgtttcttggaaagagaggcgggaaaggtaaattctcctcataatactggtcctaagcagttaccctgtaaatagttaatgtgagctccacgggtcaccaatataaagtttcctgccttctgatggacaaaggaagcggcgatggccagaatttgcagggacgctaaatgtccaaaacgtatgccttaaggcatttctctccctgatgcgtg

SEQ ID NO: 10 - DNA, 4511 bp, Homo Sapiens
ggagcattcgaacgcggaaatcgaggtgctagtccaaactgctcggtcggctttagtcatagctggataatgcccggctcaggtctaccacaagccatacagctgctttttccgtgttcaacctgtctgtgacagaaaccaagggggccccggcacccagcatctaggcggtggaatcggggtcttacgcacggttccgcgggcaggtccccggccaggacccgcggggagccacgtagccaggagggtggggctgcccaccgacccaggacgcggcaacggaccggggagggcggagctccagcgaccgcttcccctcccgcccgccggcaccccctggctcccacctggtcccggcgcggcctgcgagctagcgaggttcgcgcggtgaagtactgctcgagctccgagtccgagtcctcttggctgcagtagccactgctcgtcgtgctgctccaggtcatttcgaaagaaggcgcctccgcctcgcccatagccgtacccgcccgtcccccagtcctgcgcgtccgtagccgccaaccaccgccccggtcgcgtgcgtgcgtgtacgcgtgtcagtgtgcgcgtgcgcccgggccagagccgcgccgcaaccgttaagactgaaacgtagatcgccgggatctagctcttgtctcattggggcaggaacgccggggcggggacacgcacgcttcgcccccaggaatgacctcatcgctccggagctccactcacagaccccacctaccacagggaacgggggcgggtgccagcgtccgggcaagcgcacaagagtggcctctggccggaggcgagggcgggaaggtgcgggaagtgcgcgtgcgcggagcctgggtcagcctgggcccgggtccgcttgcagcgggtggagtacttgcggagccggcaatccaggctcccctcccagcccccgcgcagaattagcctctctgtgccgccgggaaatcggcaattagaacgctccttgcgcgcggcacccaggcagccctcgagaatgcctgcactgtggcctgcccatcctcgcccttcccatacgccctcggccccgcgctcaccacgttcgtgtcccgctccaccgcgggttcccagcccaggtcccggggcccgcaacagtccaggcagacgagcgcgcggcagcggtagtggcaggtgaacttgcaatctgcagagaggcctggcggtgaggcggaggagctccaggtcggggaaatgtcccggagattgaagggaagccccagggagagggccgctgctcgccaggctccgcaggcccgacctatctcagtgggttacctcacactgctacgcggactctaatgttggccacctgggcgtctggaaaccggccggaaggccacaggcagagaggcctgctcaacagttggatctctatcgcctagcacagaacttcccctttcctcattggcaattaaaaaaacaacaacaaaaaactgcgtcttgcttttgtcacccaggctggagtgcaatggcgcgatttcggctcaccgcaacctccgcctcctgggttcaagcgattcttctgcctcagcctcctgagtacctaggattacaggcgcccgccaccatgcccagctaatttttgtatttttagtagagacggggtttcaccatgttagccaggctggtctcaaactcctgatctcaggtgatccacccgcctcggccttccaaagtgctgggactacaggcttgagccaccgcacccggcccttcactgggaacgtatatggaatacatctgcccatttacttgaaggaaaaactaaacacctttaacctacgtctgccctgtggttgtcacctgtctctactcccctcagaccaagacactggtctctatacactctaatccttcgccttcactctcccctctacccactccagccaggcttgcctcttcctccaggaaactgcccgggacagggtcctcagcgatctgtgtactaccaaatggaatccagtgttccattctccattctcaccccctcagcatcatttgaagcttgctccctttgactcccaggggctacactctcccagttttcctcctaccccctgcagctcctgctcagctcctttgcagattctgactcaacttccatatctcacgatgaagtctgggctcagtcctgatcactggcctggtctgtctacattcatctgccccagatccacggctgaaacactgacctaaaccctcagactagatcctccgtgccagtaccttcactaggatgtctaaaagacgtttcaagtgaacatggccaaaatttaattcccttttcttcagcctcactgctacacttgcccagcttcctctttgcagcaaaaatggccactaggctcccagttactggagacaaaagcccaaacttatctttgatttctcccttgtctctacctctgataaacatgcccaaatcatcctgcttcttatctccatggctactttatttctctttgagaacgctgcaatgtcccagccttgttctttttttttttttttttttttttgagacagagtctcactctgtcgccaaggctggagggcagtggcacgatctcggctcactgcaacctccgcctcctgtgttcaagcaattctcccacctcagcctcccgagtagctgggattacaggcacccgccactacgcctggctcatttttttttattttttagtagacatgaggtttcaccatgttggccaggctggtcttgaactcctgacctcaggtgatccacccgcctccgccttccgaagtgctgggattacaggcatgagccaccgcgctcggccccttgttcattctttgcattctgtcacaactttgtgctccccccagctgaatttgtgatgtcctcttgtaccggatgagagggtctccatgcacacacagacctgggacactatccatccacaagttcctaaataggccagagcagtgatgctcaacccagactccatgttacaataatttggggagtttttaaaatttactgatgcctagggtccactcccagcagttgattcaacaggtctgcggtgggatccaggctagcggggaggactgtaaaagcacccctggtgattccagctggtgtctacccaggggagagcaacctttgcttgctggcgattcccaggggtgcagaaggactgctgggtgtgtggctgcgtgcatattttagcatctgattcactgggtcagaaaagggtgtttgctaaataaagactcaacaaaactcctgcttgcagggggcccaccaaaggttctaaatttttccaggctccctcccataggtggtaatttcccttcaccctaaaggttctggagggggtcatgagtgtttgagaagaggcaagcctgggaagatggactccgaggacagtaggcacaaaccctttctcaagaagggccaaggcattttaaagataagaaacttaaaatcagcgtatttttacatataagcagccacctctgctcatctgtggcccagatacgagtggagtgcgacaagggataaaccattttcgcgcactcttcagcgatggggcgaaagtaacggacctagtcctcgggagctgtccccgccgaccccctctgccgcgacttgacccgcggcgactgcgctgccccttggctgccccttccgctctcgtaggcgcgcggggccactactcacgcgcgcactgcaggcctttgcgcacgacgccccagatgaagtcgccacagaggtcgcaccacgtgtgcgtggcgggccccgcgggctggaagcggtggccacggccagggaccagctgccgtgtggggttgcacgcggtgccccgcgcgatgcgcagcgcgttggcacgctccagccgggtgcggcccttcccagcgcgcccagcgggtgccagctcccgcagctcaatgagctcaggctcccccgacatggcccggttgggcccgtgcttcgctggctttgggcgctagcaagcgcgggccgggcggggccacagggcgggccccgacttcagcgcctcccccaggatccagactgggcggcgggaaggagctgaggagagccgcgcaatggaaacctgggtgcagggactgtggggcccgaaggcggggctgggcgcgctctcgcagagccccccccgccttgcccttccttccctccttcgtcccctcctcacaccccaccccggacggccacaacgacggcgaccgcaaagcaccacgcggagatacccgtgtttctggaggccagctttactgtgctagaggaagagggtccccacatccggccctggccctcctggtccggtttgctgaagcaacacacttggcctacccactgggtggggcaggaagtctcgagccttcacttggggtgaggaggagggagatcggtcagcagctttaccgcccgctctgctctccactgcggagactggggctccggcagaggctggaccgtg

SEQ ID NO: 11 - DNA, 1775 bp, Homo Sapiens
acaccgagttacgaaacttagagcaaaagtaaaactttctaatggaatgcccatgtaaatactagaaatataacaaaataaggcaaagtctgtcctccaaaatgttgcctaccacaccaaaacacaatcctgctttttaaacagcgagtaaaattaaatcaaccttatcttcctaaatagaagtccactcaaagttttttcacaaaaatgacattcacttgacttaatattgtccttccaataagaataacacgcagggtgttagagggcagttgttggactcctcttcagcaaataaaggagaccagttagagcttagcttggtctgcccaggaaaggaggaacgcagcttgctgacatggctaaggaatgccaattaatacattttaaaacccctatcatcttgcctgagacgtgtacatcttcccaggccctcaaagttcaatcagaaagtgtattcaactccattgtcatttcacccatagtggggaagtccatcgaggaaaaccatagggaaataaaatgtttttcagttattcatattagcacaatcaacccagagctcacggcacaaactaaataagttaacttgccagtgtcttgaatgaagacatttaatcaaagcatgcattttccaactttccagtagctttcaggacagttggttttggtgatcgttttttggtcttttattgttctcaacacgactggtttctcaccgcaggatttcaaacaaaatgagacaattaaaccacacctcgagcgaaggggcgcttaccttgcagataaacacaccggccttgccttctctaaaatgcggacacgtgcttttcccgcattagggggggtctcccggcgcgcgccccgccgccacctgttgaggaaagcgagcgcacctcctgcagctcaggctccgggcgccagccctgccccgcagccccagagcccgtcgcagctcgggtggtccctccccggcccagcgctcgccgcctgctcttcgccctgcaagtttcaagaggcagttatttctcgcagcctccgcgcttgcaactgcctcctggcgggggagtgggtgtccaaaaagccagcagctggagaaactgaaaagatcacaagcgacttaacgataagccccttcttccttttaaagaccgagaggagggtagaggggagtagtgcctgagcccacgtgaccgagccagggagcccgacggtctcaggaacgcccgacgccgcgcgtgacctctaagtgggagcaccctcgaaccgactcctggtccacccacaaggatagtggcgcacagatggcgctccccgcagccccagtctcagatttaagaggtctggagtagggcctgagaatatgcatttccaaccaggtcctgggggatgccgacactgatacagccagtctggggaccacacttcgaggatcacgtcctcagcccctgactcacataagtgtcattcagaacagatgtctgattctaaggagccagtggtgaaaccagagaggctttgggtttgtcaaatccccagcagcaaacgtaacctcgggccctggagtggcaaagccgtggactagaggtggagggagtgggttctcagctctcaagaggtcactgggaaggcctttcgcgttagatcaaagatcccaggtacttcctcgaactcacttgaagtggcaccggggagacctgtgcctccggccacggcgcccttctccgctggaggcacctgcccacccctcttctcgggcgaaggcccctcgcgcc

SEQ ID NO: 12 - DNA, 1223 bp, Homo Sapiens
cccatgtgctctactcggggttcggagtaaacaaaaccgacctaaaaataattttgaatgatagaaagggggcattttctttatccaagggggtgaggcaggctgaagatgggtctctactccctccaagaccatggagggcgtcggggtgtcaccccagctgtgaaaaagggacccaggacccgcagatgctggcgaggaacaggggtgcggagcatgagtcggctttgcaccacgccctggggtctccagcactgaagcgttcagtaccatgcagagcagctgggagcgggtcccgctgggcggggccgagctgcgcgcgaccctcggcgcgctcggggaggcccagacaggggtggcctctctggcctccgctcccgcgggctctatgacaccgcactggctcgcgggacggggcggggtcgggtgagggggaggagacagccccacgctttgcgactcgcggtgacccctacgcggaactctctcgcggtaattcgaagtaccgcgcctgcgtgctgcagtagcgcctggtggcggtggcagtttgcccgcgggtgtgtgaagggagacagtgtggaggccacagggtactcgccacgatgagcagcaccttagctaagatcgcggagatagaagcagaggtaatggacgcagctggcggttcactcttagtctgagcattccttctttggtggcgtcgctccttcctgttctcctttgagccgcgtcaggaccgggcctagattccgcgacttctctcagcgaggcccgtgttccgactgccctctgccacgattaggagtccccgactctcctcagtcagggccccctttcccctcgtcccgcgtctacgctctcggactcccctttgcccgggcccgcgttccgcacccctgcaccttaggcccttagtccgttccccctcccagtgtttggctcctgttctgatgttgtttctttccgttttgctctgagaaacactgaatcctgtcccttattccatctctgacttggtcagatagttcaggatctttcctcatcatccttcgctgcgtcccccttattcccccttttcccagtgtctaccctaatgaccccctgattcagagtatttgctcccggtaatcggatctggaagtaaaatgacatctgtgtgggagcagtttattccgcctggatagtgtgtgattccattgcgtgcggccctgagagcgctttac

SEQ ID NO: 13 - DNA, 2183 bp, Homo Sapiens
aagggagaaggacgggggcgctgtctggtgactgttcgcgtgattccttcaaggcggcgaccacctcctgggattcgctctccagccgcgccgttcgtactcgggtcccgcgacccctccccgctcccccctcgccccagcgatgccaagacgctgaaccgcagggacgaggctctggggacaaagtcaccccgcggcgccctttcctgccaagccgcgggctcctggcggtcagaaagcgccccaggcccacccctgcgggcccggctttccctcctcacctaaggctccggggccacgagtcccccatcctgcgcccctcccgcgcctcccccatcccaaaccccagcagcgtcgctgcctctcccggaaacaagcccgctgagcaaaggcggaggaaaaccttgggccttccgctctgattggtctccccccgccgagcggggcgaggcagcgattggctgccgggcgttgtcagtcgccgaggccagagccatcgccggggaagcgcagccgggctcgggtgcttcggctgccgccgcggctgctcggctagtgcagctgggcgagctcgcgcgggcgccgccgccgcctctgctgctgcccaccccgccgcgccgccggcgctgccggtcttgcaggcggccgccggggaggggcggccgagagagcggagcacgaggaggcgggggcggcagagaagtgatgctggcgccggggatcggggcagcggcagcggagcagcagcatcttcgggaccctggctgcagcgtccctgtggcccgcgcgccagcccagcggccggagaccacgcgccccgcgggtaaggttctgtccggcagcgcccgcgacgcccccgggacggctggcgtggtctttgggggttacgaggcgcgtggtggccggggcatcccgacgaaggtgttgggacccggactgcgtgtcccgacgctgggctgtgctactgcccgcgcccgtgcggctccagctggtgcgttctcccttccgcgctcacagactttgacagcgcggggatggcattgtgtgagtgtggatgtggatgcgtgtgtgcgcgcgcgcggcttggggcactttgcagcgagaacagtgggtcccctctgcgtggcccgacgtccttcaaggacccaagctgggctggagtgagtaggatgctgttggctcggcgggaggtagaacgcacggagcgcacgggaaagtccaccgtggctcgtaaagagccgagcaaattgaactttattgcggtgattaaaaggagctgtggacctggcgcgccaggggagaggcgcgttccacgaggctccccaaagtcccactttgccccggggacttcggaggggaagggaagagagggaaaagtaactgttggtccacattgctgaagaaaaggaggaaagagaagttgggggtgggggtgggggtggaggttactcttgggggagtggcgacttttaggtgtctgaagccccgcgtgggaggcttgctacacttttctggagcgcagacttgaggatggagagtcccactctgaggtactggtagcggctcctcctgcctggtggcggcgtagggcgcagcgggacagcttggtggaggcagagcggggctccgacgcccgacggcccggcgtccaggtggggccactgcctccccaggccgctttggcccgctgacctcccaggttgagacccggcctggtgcgcctctggcagctgccaaatgcctggcggctccgctttccgacaaagttcaggcccgctggggtctggtccatcagacctaggacacgttaaccacgcagagtaaccaggttagggtacccagctgcctccagagcgtttttgtttcatattagattatcttatttgataaagctgttgagagttccacccgtgctgcaaagccttccgcagaaggcgaattctttgcgctgctgcaaatggatggtgctactgggccagatccgaatctccgtagttcagtgcagtgggttctccatccctgctcaggacgcacaaacttactcttggcgattgttttctatgtggctccttgtctccgtgggagtatctgcttaggaaagttcttgaaatacctcaatactaaggagctctccccactgtctcagatggggcgaggctccggtacttgactggcgttggggt

SEQ ID NO: 14 - DNA, 8030 bp, Homo Sapiens
tctgcgcaacctcagctagcttgaatcttcggaggcaaacagagcgcaacctgctttggaagaatcttgttacgtttaaggctttatgccgggtgttggcctctctgtcttcaactacccctccaccccgactcggactgcagaaatctccaactctctgtcccccagttccactcccacctccagacctggggttgccaaacaacggaaattctaggaagacgtaggtgcggtttttaaagccttggcttgtgagcgttctcaggctggccggggcgctggtcttttcagaaacaaggtttgaatatgcaggtgtcagccaggattccttgtcgtctgcccaccgccgtttctctcccgggatttgagagaagcgggagtgtgtgtgtgtgtgtgtgtgtgtgtgtgtgcgcgtgtgtgtgtctcgtgttaggagaaaggtccgtggttgccgtctcagctggtttgcttactctctgcccccaggagaagtttgctcacttgggacaccagcgaccctcctcacctccacctcaccggttctacactctccccacttctttccaagtcgctgatgcagaaagcacttggtcaccttgaaacggcagctcccggaattctagttttgttttgcaatctagcagggctcttcggaagcctcataactgagatttatgggctcaccgggtaattaaatgatgttattgtgttaactttgcatgcattactgctgcccgcgccgcccgtgggccgccggccggccgcagctcgctggcgacgagggcactacagttgctctgaccgcgtagattatgcatgtcccggcctcgggaatttaccatgcattagaatacattagcgcctgcattttaaaaggctaaactattggctcccagctagggactctcggtaagtggcttgttagtgacgagtgtttgtctatactggcacatagcggagtcttttgctcccggcttactcgcctccaggaaagctttggggtgaggcgaaggcgattgaagcaatgccccttcccccagatcgcagctgctcaggggggacacagcacggcatctttcaccgaatctctctcgctcgctcgcactccagcctccctctccccagcgacccccccaccttctcctccctccctctccttgacgtttgattccagtagcaaaggaggtaaaaaaggcaccgagccgtcagccaaacctgaaaagtgcggccccgccccctccacagccactggtagcttcccgtggaaggcccgcctcccggggcagctgcggcctcggagtggttgcgcttggcgcccgtcgggcgtggccccgccccaggtccgggagggtaggttggctgccccggcgagcggcagagcccttctggacagctcccgctcacccaaacagaagacgtcggcgccggagcgggctcggacatggcgaggctgcgagccggcccgagcggcggggcccggtgatccctccctccctccccgtcccctcccctctcccgcacgcacgccccgtccgcccccaccccgcccccaccccgggcgagcccgcccgcagcccggggcgcacacccgcacgcgcactcctctccactcactcccgcgcccgcccccactcccgcagccgagccccgccacgcgcgccttgcccgcccgccggccgcccccgccgcccccgccgcccccgggccctgatggactgaatgaaggctgcctacaccgcctatcgatgcctcaccaaagacctagaaggctgcgccatgaacccggagctgacaatggaaagtctgggcactttgcacgggccggccggcggcggcagtggcgggggcggcggcgggggcggcgggggcggcggcgggggcccgggccatgagcaggagctgctggccagccccagcccccaccacgcgggccgcggcgccgctggctcgctgcggggccctccgccgcctccaaccgcgcaccaggagctgggcacggcggcagcggcggcagcggcggcgtcgcgctcggccatggtcaccagcatggcctcgatcctggacggcggcgactaccggcccgagctctccatcccgctgcaccacgccatgagcatgtcctgcgactcgtctccgcctggcatgggcatgagcaacacctacaccacgctgacaccgctccagccgctgccacccatctccaccgtgtctgacaagttccaccaccctcacccgcaccaccatccgcaccaccaccaccaccaccaccaccagcgcctgtccggcaacgtcagcggcagcttcaccctcatgcgcgacgagcgcgggctcccggccatgaacaacctctacagtccctacaaggagatgcccggcatgagccagagcctgtccccgctggccgccacgccgctgggcaacgggctaggcggcctccacaacgcgcagcagagtctgcccaactacggtccgccgggccacgacaaaatgctcagccccaacttcgacgcgcaccacactgccatgctgacccgcggtgagcaacacctgtcccgcggcctgggcaccccacctgcggccatgatgtcgcacctgaacggcctgcaccacccgggccacactcagtctcacgggccggtgctggcacccagtcgcgagcggccaccctcgtcctcatcgggctcgcaggtggccacgtcgggccagctggaagaaatcaacaccaaagaggtggcccagcgcatcacagcggagctgaagcgctacagtatcccccaggcgatctttgcgcagagggtgctgtgccggtctcaggggactctctccgacctgctccggaatccaaaaccgtggagtaaactcaaatctggcagggagaccttccgcaggatgtggaagtggcttcaggagcccgagttccagcgcatgtccgccttacgcctggcaggtaaggccggggctagccaggggccaggctgctgggaagagggctccgggtccggtgcttgtggcccaagtctgcgcgccgagtcacttctcttgattctttccttctctttcctatacacgtcctctttcttctcgtttttatttcttcttccattttctctttctcttccgctcttcccctactttcccttctcccttttctttttctttcttactctctccttgtccctgagctttcattgaccgacccccccccatttcattcgccctcccctcaatgtgccaacctttgccctatttccgatcttcccaggtactgggaggcgggatgggggtgtgcgttttcctctaggagccctgtctttccaagacccacagaaaccaggacctgcccttattcaaaaccccatgcacttcaagtctcttttagacaacacatttcaattttccgggctgactagtctccctgtgcagaggcagttgagaggctttgctctgcagagggaaaagagctctctactctcccacccaccatataggcaaacttatttggtcattggctgaaggcacagccttgcccccgcggggaaccggcggccaggatacaacagcgctcctggagcccatctctggccttggcgttggcgcagggactttctgaccgggcttgaggggctcgggccagctccaatgtcactacctacagcgagggcagggtgtaaggttgagaaggtcacattcaccgctttgggaggacgtgggagaagagactgaggtggaaagcgctttgccttgctcaccggccgtccttgccccggtcccagcgtttgctgggatttgccaggatttgccggggctccgggagaccctgagcactcgcaggaagaggtgctgagaaattaaaaattcaggttagttaatgcatccctgccgccggctgcaggctccgcctttgcattaagcgggcgctgattgtgcgcgcctggcgaccgcggggaggactggcggcccgcgggaggggacgggtagaggcgcgggttacattgttctggagccggctcggctctttgtgcctcctctagcggccaagctgcgaggtacagccctctattgttctaggagcacagaaacctcctgtgtgggcggcgggtgcgcgagctagagggaaagatgcagtagttactgcgactggcacgcagttgcgcgcttttgtgcgcacggaccccgcgcggtgtgcgtggcgactgcgctgcccctaggagcaagccacgggcccagaggggcaaaatgtccaggtcccccgctgggaaggacacactataccctatggcaagccagggtgggcgacttcccatggatcgggtggaggggggtatctttcaggatcggcgggcggtctaggggaacaattcgtggtggcgatgatttgcatagcgcgggtcttgggatgcgcgcggttccgagccagcctcgcacagctcgcttccggagctgcgagctcaggtttccacccccgatcccccgggctttcctcgcaccgctgagcccagcttgtggggtgcactcgaccaacgcccgacagggctggggaatgtgacaggcagcaggttcacccgggcttggggagggggagtttccgctttgacagcattttcctttgccgtctgctggtggattcctattcccagtcggtaatcgccccgcagtgttgatctaagaaggtaaagaaaactaggtttccctgcaaagagcctcccccaaatcggcggactccggatactttgagtggatttagaaatttatgtaatctttctcctttagtttatttttcatcctctcctacagttttctctgatttgctgttggttcggggcaagataaagcagccagtagagagcgataataatagcggcgggaaatgaactggagactggctgacagttcttaacattttgtcatagatccccccgaatgtcccaggctgtctctggtgggttttagtacccgccggcttcttgggcaccggggaccagaaggaacttggcagctggtcttaggggtacagttaaaggcaggatgacagctattctcctgctcatctcagagcgctgccgccccctcatgccggtcgcgcaaagaacacagcttttaaaaaacacgtgccttctgcccatataggtctgaaagtgatgaggaaagtaatgcttcgcctattagcgagtttcagcttttaaaatgatcccaagcgttgctgagatgagaaagcgtggcatcccgggggtcctcagccccacccgcgcccatggtgcaagtctgcagggacaggcccgggacagcactgcccacgctgctagattttccgcagaggatcgctgaagctgccttcgtgggagacagaatgcctcctccagcgagtggaaaaggcctgctgaggaccccgctttgctcgagcattcaaatgtgtgtctgttttattaccctgggttgaaaagggacaagagctttagcctttttatctggccattttatcagcaactacaagtgtgttgagtggttattattacataggaggcttttcagtttggggtcagtagatcagtctcttcagacactgatgcagaagctgggactggtaagtaggtattatgtgctcggagcgctaggggacaggagcaaatggagaagaaaagcggaggctttctccgcccggagtatcgatcggaatccccgccggtacgccgcagagggccctcgccgttgggccccgggggtttaacaagcccagccgctccgcaggcggctcggccggactctcagaccggtgcctggaagacaccgtccctgcccccctcccgccaaacctgcctcttctctttctctcataggttataggttccctttctctctcattttggccccgcccccgggtcctgccaaacagccaagcaggccggggtttagggggctcagaatgaagaggtctgatttggccagcgccggcaaagctcacccttaggcgaggtcacaacagaggcaggtccttcctgcccagcctgccggtgtagtcacagccaagggtggcacttgaaaggaaaagggagaaaacttcggagaaatttagattgccccaacgttagatttcagagaaattgactccaaatgcacggattcgttcggaaagggcggctaagtggcaggtggttgcaaccccgcccggtcgggccttcgcagaggttccccaagaccagcccttgcagggcggttttcagcaacctgacaagaggcggccaagacaaatttctgcgggttcgagcacacactctcgggcgttgggccccagagacctctaaaccaagcacaaacaagaagggagtgagagaacccaggctagaacttgcacgggcatcccactgaggaaaagcgaggcctcggtggcaggcatgttttcttccgacgcccgaaaatcgagccgagcgcccgactacatttactgcagaggtttccgcctccagtgagcccggatcccccagcggcctgcccggagctggtctccagtccccgccgtagtccgacgcacggccctctcctggcagcaagctcccagcggccagtctgaagccaattctgttcaggcggccgagggcccttagccaacccaccatgatgtcgcctgggccacctgatgcccgcagcggcgggacacggcccgggcagtgcgcagtggctcctgctaggggcaccgcgtgcgtgcttgtctcccgctgcgccggggacgtccttgggtgacacgggccgctgggcacctcccaagccgaggaaacggacccccttcgcagagtctcgcgcccaccccccaacctcccacctcgtttctcgctgctagggctcccgactcagcccacctctcctggcggtttagttagggatcagagctggagaggctgaacgcaacccgtgccagtacggaacagacgatatgtttgcctgctagctgcttggatgaataattgaaaagttcgctgcagtctgtgcttcgtcaagtcccgggtgccgggagaacaccttcccaacacgcatcagggtgggcgggagcgggcagaggaggcgggacccgagggaggagagtgaacccgagcaggagaagcagcccaggcagccaggcgccctcgatgcgagaggctgggcatttatttttattccaggctttccactgtgtggttatgtcactttctcaaacaaatgtgtatatggagggagatcgatgctgataatgtttagaagattaaaagagcattaatgctggcaacaataacgtaaacgtgtggacccagatttcattgatctggaacttgatccggcgcgtttccagtaagcccgacggcgcgctcttcccagcagagcgctcaccagcgccacggccccgcggttttccagcggtgccgcttcgccagctctgcgcgggttctcccgtctgaccgcagctcctcccccgcgaggccccagcccgccttacttccccgaggttttctcctcctctcgcggggctctctgccctctgcaccccctcccccgacctctgcaccacccgcccctgtgcgcacacaccgctacttgcgcttccggcgatccgcctgggcggctgggtccgcgaagccaatgcgctgaacggtgcccgagtcttcctaactatcctgtgcttggccgttgccactgggccctggtgactaagcccaagtttgaaaatgacgtggctaaagctgcctgctaacggcagagcttaatcagccgcagatcccctcctatcctcatcggttctcgtactaaaaaggctcacgcgcagactttttacgcaggtgcattcgttggacaattaaacgtggccctagtaacaaaagcctgagcttcatccctccgagtagcaggctctgcgctggactggtcgggtctaacagggagaatcttgtgtcctaccttggctgggacaggaagtaagagaagcaaactggggaacccctgccccaccccttcccaccccctggacgtcctgggccgaggcccgggtcactggcccatcgcgggta

SEQ ID NO: 15 - DNA, 2225 bp, Homo Sapiens
cacctgggtgcaggcgggctgagtccgaaaagagagtcagcgaagggagataggggtggggccgttttataggatttgggaaggtaatggaaaattacagtcaaagggggttgttctctggtgggcaggggtgaatctcacaaagtacattctcaagggtggggagaattacaaataaccttcttaagggtggggaagattacaaagtacattgatcagttagggtggggcaggaacaaatcacaatggtggaatgtcatcagttaaggctgtttttacttcttttgtggatcttcagttactttaggccatctggatgtatacctgcaagtcacaggggatgcgatggcctggcctgggatgcgatggcctggcctgacaactattacctatgttatgtttattattttaagctttattattactattttatttattttattttattttccttccacacacccgtttccaccctggagaggccagatgagccagactccagggaggcctagaagtgggcaaggggaaacgggaaaggaggaagatggtatgggtgtgcctggttaggggtgggagtgctggacggagttcgggacaagaggggctctgcagccattggcacacaatgcctgggagtccctgctggtgctgggatcatcccagtgagccctgggagggaactgaagacccccaattaccaatgcatctgttttcaaaaccgacggggggaaggacatgcctaggttcaaggatacgtgcaggcttggatgactccgggccattagggagcctccggagcaccttgatcctcagacgggcctgatgaaacgagcatctgattcagcaggcctgggttcgggcccgagaacctgcgtctcccgcgagttcccgcgaggcaagtgctgcaggtgcggggccaggagctaggtttcgtttctgcgcccggagccgccctcagcacagggtctgtgagtttcatttcttcgcggcgcggggcggggctgggcgcggggtgaaagaggcgaagcgagagcggaggccgcactccagcactgcgcagggaccggtgagtgtcgcttctgggggcagcgcccagtaaccgcgctaggagcgcggagaagggcattgggagagcggcgttcgtggcggagactagcgctccggagcacgggcacgacgggggcaccttctcggctgctagtaactaacaataataataatcataatcatagcaagggcgctgatgggcgggctcggagcacgcctgattctggttcccaccaggctgcccaggctcctgatgacgcatcagaaacatccccctaacccgcggccttcctgcaggagaggttgggaaggggtgggggacggggctcgggggaggtctccgagggactctagtaagcggggaagggcgccgggaaagtttcagatccacggctgcgcgggccacgagcccacccgaacgccgaccactgctttccgtcgacttctatttcctgggaacgcgcgaaagcaaacccaagtcagactgcggaggtcgctggggagggaaggttcaaggagttctcgccgatcctgctgaataaagggggttccgagctgggccgagatggggcatgcgcgggaagacccctgcccgctgttcccccccaccgccccagtggatgccatgcctggggcctccccggcgcgtggggctgacgcaccctcggggtccatcgtagttggccgggatcgtggagtgggtgcggtggacgaagggaggcaggacagtcccgggggtggcagaaggagcccgggcacagctgagacctgcgctcccatcccaccaacactcacagcaggtgctgccgagctgggcaattgggatggcccaagttatttggttaaattttaaatcacgtttgttactgggaagtagagtccagtgatgctaaccgcgcctctacctccaccaccggtgtcagtcccaaagggctcctaaaatggctgtgtcatctttcagccttggaccgcagttgccggccaggaatcccagtgtcacggtggacacgcctccctcgcgcccttgccgcccacctgctcacccagctcaggggctttggtaggtagcagtgcatttggtctaaagggcaagatgttctctcttttattcataacaaatttaaataccagcagggtttggggggaaaaacgctttcagaagaaaaggtgaatgtcag

SEQ ID NO: 16 - DNA, 3377 bp, Homo Sapiens
cacccgcggttctatgagtctgtactgaagtcggatatccataatattttccccaacatcctatcatttttctcccttgacaaccatgttttgagaacttgaagcaacagatatgaagagtcttaagggattgcatcaatgtacgctaagattagtctctaccacatagtccaatgacacggttttaggttcagaagggatgctctacacccacagaatcccaccgagttcaggtgccagctcagagaactcatcaccttcctgtttcccttcaagagttaactgatgggatagtatgcaaagcacatgcgttcttgctgccaaaatagcagccaaaactgcctgcctagatgtgtaagatcccatgaaatgtcttggcaaaagctagtttaggagtgttggccaaggtgctgaagcgaagcaaggggagtcaggaccacctttgccactgaatctcccctcccccacctctttttaaagacagcgagcttattcattttgacaagataccctaggatttcaaatctgacataattttggagaaagcagtgcgtgtgtgtgtgtgtgtgtgtgtgtgtgtgtgtggtgtagaagggtatctgggatacataatctttatagaaattctagtgccacaaaaattctaggaggatctacatttaaaaaaacacacaacagtttaagctgtttattccaattgaacgctgtgtgtttccatcagatcctcagtgagattcagtccaatgagtcaattgcaaaataaagtttttgtcaagggaatggcagaaaatgacaaaaccacaattctgaatgatcattcaaaagtaaaaagtactttctactactgtgtggagattttcttatctctacttttactcgaattgaatcttttcttctaatgttcttttgaacagtttgtctttggtgtcctgaaaatgtgcacgctgatagcagtaccacatgctgtccctggcacagagtgagctaacagttgaaccacctctgggtaactgcggactgcagctagtgtaagtgcaagagaaggcaccctggccaccaattcgtttcacactccaatcacccccgcccgctctacaccccctgggcacccgatgcctcttccctctgccaggcaatttgcttccgttctgttcaactttccgacctctggctttagagaatagtcctggctgtgggaactggctctgggaagcttttggcgccctcctcattggtgactggcaagagtaacactttcacactcttaaaaagagccgtttagttcctaatgatattttctggcaaaaaagaaaatgaaacacacaacccggattccggtccaccaaacgcaggccaagagcgcggctgctgagccccggtcttgctgtgaggctgttgttcccactcgcttcccgtttccactagagttgatttgtctcttgccacctctccccggcagtgtggacctactgcaacgcaggaacatctgggttggtatggataggatcctagcatcagatgctggctgctgccccagggacttcccgcggaaatcacccagcacttagaagccgtttcaataaggaagtaaccagtaaagcattgctggtgggagaaccccgcgaaacatcttagaaaaatatcagaaaccgctggagacctaatgacccacgtctcctccagcctgtgttcctcagccctttctggaggagtattaagtggtttgtgggtttttaccctgcggtgggagggctgttccaagtacatctatttctgcgatagttaacgtcggggggccccagctctaaccagggcgaggaccacggactgcatccctctctctcagcgcactggtctgtttactggagggtgagagggacgcgcagacctccggactcaggggttctgttctgtagatccccccaccccacccggggtctctggcactcgtatcacttagcaccagtgtgactggcggtgcattccggccccctcgcgccccattaaagcccctgcacatcctctcccacgctgcgcttctgctacccacgcagctgctcctctgagcgtcccgcgtgcacaaacgcgcccccggtccttacgcgtcggtggcgctgcctcgctgaggtggcgccgggggagcccgcagaggcggcgggggagggagtgcggaggagaggacccgtgagctgcggggacctgggcccgccgagcttttggggaagctgggctccgttccccccgggcgcctggggcgcgcgggaaggcgcggaggacgcgccgcactcacccgctgctgctgccggctgctgactgccaccgcggcggcggacgcggcgctgtgccggagctcggccgcctgcccaggtctcaacaggctccgggtgaacctgcgggtccgctcaccggccatcgccggtcacgccaatcgcgccgcgggcccggggcgcgcctcccgccggtcttccccgcgccaaccttctctatccacccgccgttcaggaagcggaactcggagccttcccccccctcttcctcgctcaactcgcaagaggcgggtttttctctcttgcacccccactcttcccacccccttccctcctctgaagcttctcgaagactttccaaactctgcgctcccccgggcgcgcgcggccaactcggctggcggccgggccctgcagcggcgcatctggagcgggcgtcgcgggacgcgtgtggggcggctcctgcccgcgccgcccacacgggctcagctggccggccggggctgtccacgccgcccgggggaactgcaggctgcgggggagggcggggggcggccgccgaggggctccgggcggggcctgtccaaggccgtcgcctgtccaaggccgtcagcctcatttggaggttgctgggagagttggagccctggatgcatttgccgtttagacttctattttctgggtccggctagtgggtgggggccaagctcggttcgcccttccaccctcgggaaggggtcagaggcttattaaagatctggtggctgggatcccagcagcatcgcccaagccagcgtttggaaggctcccttgccagaagtccatgttcagggccttggaataagcttccccattcattcactccttcaatgagtatttattaagcgcctactatatgccagctcacactgttctggaaactgaggatacggagaggaacttagcaactacactttaaggctgtgtagagctgataggttttttcggggtaggggtgggagacagcaagtaaccaagcgaacaaataaacaaatacagagaaatcaaggagacagtttaagctactaacacgaactcaaaaccaataaatcagcgttctgggggtaagag

SEQ ID NO: 17 - DNA, 3043 bp, Homo Sapiens
aaaattcaaacctataatttgaggtacctgggaagccgctttcccagggcggaatggtcacggaaactgggtaggctgggggccttcttggggaatgagggagtggaggagctctttgtccctcctgctagatcagaaagagaaacgtctcaagaatctgggcctccatcttctaggcgtctcccttggaggcccttcagggaccgcccacagcgctttctctcagcctcctccccccccccatcccctcccccacccgccccgtctcgcgcccgccccgcccctcggcccgcggggttccaaggacggttggtcgcccccgccacagtcactcggccgctcagagcggcggggcgcacggggtcgagagagccagctctagggtttggggctgggaactgaagcctggcgtgaaggaagtgggagcccgggccgaggaggcgaaggggaaaggaaaagcgaggggaacctgagcgggagggccctgagaggagcgggaggctgcgggaaggggaggcctggcactcctgggggtcatgggggtcggggcgcggctcccggcctgggagggcgcgggtcctccccggcagcgccgcccgctggcccagctacgcgtgttgtgcgctgcgaggccggcgggggtcccgctgggcccgggggtgtcctcgggggccgcttgcgcccagccatggtagggcgtcccccggtgaaatggggtccgaggcgggccccgaccccgcgtcggcgctgcggaccgtccgggagctgcagccgcgggtgcccggtgctcggtttgtaggcagtgtcattagctgattgtactgtggtggttacaatcactaactccactgccatcaaaacaaggcacagcatcaccgccgcccggccgggaagaagacgccggctcgggcagcccgcagccttcgagagaagatgcctgagaagcgcggcgtcggcgtgggtcctgcgcagcctgccccgcgagcgcccgctgcaagtgcgaggaaacccgcggtttctccagatacagttaaactgttagctctctctaggagtcacagaagatgaaacagtctcatgccaggaaagcaaaatccctggaggtgaagcccctccatccatgtaacggttaatactgtatgctgtgattcactgtgtctatttgccatcgtctagtagagtattcaccaagctagcaactcagttgagctccaactcaaccaatgaattgcctgcctgtcacaacgtgttggggtaccaacttgagactgcaattttttctatgagtctagttactaggcagtgtagttagctgattgctaatagtaccaatcactaaccacacggccaggtaaaaagatttgggaattcgtccaaatgagctgcctgtgcatcatcaatgtgcgtggggaagaggggtgttggaaaatgctgatttcatccattgcctattaattgctcagccaaaagaaaaaaatcaacatttcagctactaagtttacaatgtatgtaatgtgtatgtatgtggggttttgttttgtttttttttcaatattccttcaggctcttaaccaaaattttagatataagggggaatatgatttttttcttagctgactgatgtatgttattatatgaacatgtgattattaacttcttgagactatattgttagtaatattttgaaagtaatattgttagtaatatttcgaaagaataaagtgccataaagacataaattgtggttattgctatgtgtccatttcctttgctaaattgactttatgatgtccatctcagttcctgccacagtaatcttaacttttctatcaatgaagtggttaagttgttcctgccatgacaaaaatctcccgggaaagctactcatacacacagacttgttaatacttttataagaaatacattaacaaaatttttcatacttcttttttccatgaagagactctgttcactcattaagatgtatcccttcttttaagtaatcatttacaactgttggagtctatgcaacttttagtgggagtgattagtaaatgcacttacactttaaatccagcttgtttcctaagatttaaaggattcagaattttaaaatcacagaaactgtacacatgggcacgtatccgcccagttcaggcctctagctcccaagggctaggctttcaggcgtgaattctccagcgcaacgttctcagaacttccacctagcaggtgctgtccctggcaatctggtttggaagtggggattggggcaatggggctgaggaatttaaagtttatttagctatctttctggggggaggggagaggatgtggcagcccactgaggatataagaagctaaactactcccccactgactccgacaggacacaacccaaagttgacgttttgactctcccatatccaagatttggactggtcctaaaacctgatcaccgcaggggtgggcttccgacggcccccacgcgcgtggcggatcccaacacctacctaggaaaccgagggcagccggcaggggctggtaccaacttggcggttctcggaggggcggggcaggggcggggcggggggaggggagaggacgcttgcagaagcgtcctcagttgccatggaaacgggacccagcgaagaacctagcggccgaaaagagtcccaggaaatgtgccccccgggattactggtatttgctggctcctcggaacaagatgccaacttggctaagcagttctggatctcggcgtcgatgtatccccctagcgaatctcagctggtgctgcgcagagacagcagtcagcgtctgccggtggcgcggcccaggaggagcagagggtctggtgagtagaatagcggcctcctgtcagtcatatctgcctcaccgtaactggcctgcaggtaccagagccctttccaggagaaactgcaatggtatatacaaatagttataagtacatacaaatgcatgtataaatatttcctgaacccttccagcaacccttccacccgaaaaggatcagtggtat

SEQ ID NO: 18 - DNA, 4908 bp, Homo Sapiens
ctagaggtcacgtcggccacccttttctgcctgcaatgcctcagacacacatgctctgtaacccagaaatctgtggccaagaaaggtgccaagacccgcagaaaagctgggacacaggaaagagaaacgaaggctgacaacagatctcacgggggtgagggagattaggccaatcagagaagacagcacacgccagcctcagatgcagaacaactggacctggacctaacaagctgagtacaagtggagacgcaaccagaaaagattgaagtgaaatcctcaagcaaaaaaaaaaaaaaaaaaaaaaaaaggatggagcagtagtcagaggggatgccacccctacaaaagacaaacaaattgatggaatggaaccttgcagggagagagaggaccagcagagagagggaggcgtaggaaaatgaggagtggggcacaaaggtggggctctcagggagaagaggagtcgattttagagggggagaagaaaaggacacagagctggctgtacagagaaaaggggccaaggcagagaagatggcgggatggtgtgagacggagttcacagaaatacccagagaaggcgacgattacacagaggagcccccagaggggcgaactcttgaggaagatgaacgcggagggtggagccagccagaaattcagaaaaactagaggcgtccccggtagcgaaggaagccgggaaggggccaggctatcagggcatgaagcacgggagaaaatgggtccgaagagggagagcgtccgagagaaaaggaaaatcagagattaggaaaatcacaaccgacacaaagacaagaagagacacaaggaaaggggtgcaatctgaggaaggagggcccggtaagcaacccggtaatcacagcgctgggagagaacgcataaaagaagggtagctcaggagttgtggggcaccggaagagacataacagaaaacgcaggcctccactcagcaaaaacaagccacgcgcgaagtcgaggtacaaggcaagggaaggccagaaacgaggcaacccgtgcacagaccgggcttggtcaacgccccaggggcggggccaggcgggccgttcctggggggcggggccagcctcggtccaataaggggtactcgacgccccattggccacctgcctcgaaagggggaagacagtctgggcgggcaggacgtgcggagggagaggcagcggtggcgcgaggctcaactcgaagcgctattggtgggactgatagtcttgtgcgccaagaagctggcagaagggaaggggcgggacatcagttcaggatctcaaaccgcattggtcgtctgcctcggctgagagaggcgatgcttgaagttcattggtctttgtgagacagggtaagaaaagcagcgcgagcttggcggttcctctggccactttctcacagtgtctttgggcgtcttcttgactgaatctgactccattggaggctgtggtaaccgtgaactagctgcacgaacacggtccctcctgcctttccgtcctcctccctcttagccggactccctaacccaggcatcccctctcctccccctcgcgcccctcccgccctcgcgccccctctccccttccctgcctcgcgggccccttggcgcgttcccggttccccactcgctccctggggcacgggaaggggggagggggacatgcatgaaattaattgttggtagtggccacaggagcaggaagcgctggacacagtgacttcacatgtttacacaaaaacctgaataaggtgtgagcgcaagagagacattagtgccccaaggagaaggtttttggcccagatcagggcctagcacatgacaggggctcagtaaccatttgtggaatgaatgaaggagtgaaggaaaataacttgaaagtggggcaggtggcgggtgcggtggctcatgcctgtaatcccaacactttgggaggccgaagcaggcaggtcgcttgaggcaggtcaggagttcaagaccagcctggccaacatggtgaaaccccatctctactaaaaatacaaaaattagacgggcgtggtggcacaggcctgtaatcccaggtactcgggaggctgaggcaggagaattgcttgaacccaggaggcggaggttgcagtgagccgggattgcactactgcactacagcctgggctacagagtgagactccatctcaaaacaaaaaaaaagaaagaaagaaagtgggacaggggagccaagcatagtggctccagcctgtagtcccagctactggggaggctgcggcaggaggattgcttgagctcaggaggtggaggctgcagtgagccatgatcacgccactgcgctccagcctgggcgacagagcgagaccctgtcaataaaaaaaaaaaagaaagtggagcagggaatccatgagaataaggtaattattgggggtgcaagagagggttctgatttaaaggggtacaagaacaaaataagactaaaggaatgcaaggaggcagttgctttgcagggcatagatgagactaagaattgaaattgaactaagaattgaaaggggcataaaactactggtaggcattggatgaatgcatgagagtggggtgagcattgttgaagaggatgccaggaaacactgttgggacggaacagggtgcttgtgaaaaggggatgtaggactcgctgaaggggtatgtgaggacatgagtaggttggaacctaggatgtgtgtgtgggtgggaaagtgtttggattgaaagaaaagaatgtttgaattgaaagaatacagaatgtcgggcgcagcagctcatgcctctgatcctagcactgtgggaggccaaggcaggaggatcgcttgagcccaggagttcgagaccagaccagcctgggaaacataatgagaccttgtctctataaaaataaaaataaacaattaaaaaaaaattttttttttgagacagagtcttgctccgtcacccaggctaaagtgcagtggcgcgatcatggctcactgccagctctgcctcccgggttcacgccattctcctgcctcagcctctggagtagctgggactacaggcgcccgccaccacgcccagctaattttttgtatttttagtagagacagggtttcactgtgttagccaggatggtctcgatctcctgaccttgtgatccacccgccttggcctcccaaagtgctgggattataggcttgagccaccgcacccggcctaaaaatttttaaatttaaaaaaaggggggacgggtgcagtggctcatggctgtaattccagcactttgggaggccgagacaggcagatcacttgaggccaggagttcgagaccagcctggccaacatggtgaaacaccatctctactaaacatacaaaaataaaaaaaaatagccgggcatggtggctcttgcctgtaatcccagctactcaggaggctgaggcaggagaatcgcttgaacccgggaggtggaggttgcagcaagccaagatcgtgccactgcactccagcctgggagacagagtgagactccatctcaaaaaaaaaaaaaaaaaaaaagaaagaacacagaagaggaagaggagaggggtttctgaagaaggaagatacctgagaaatgtcatggggtaaagaggggagaaagctgggaaagaagccagaatcagggcggggtctaaagaggggcaggatggagacctgcaggtgtggtctccagggcaggagggttgttaggggcaggcccacctggctatgcttaccttccactcctgcccctagatccatggaacccagtgacatgcctgctggctaccactgccccttagactctgccccctgggatgagaccagagacccccagagcacagagctgatccccaggagagccatcagccgctctccaacctgcgcccgctgccgcaaccatggtgtcaccgcccatctcaagggccacaagcgcctctgcctcttccaggcttgcgagtgtcacaaatgtgtcctcatcctgtgagtatgaggtctgggaggggaggaggatgagcctcctccaaagggtggctgacctttgacttgcaactccccacttttagggagcgccgcagggtcatggctgcccaggtggccttgcgtaggcagcaggaggcgcagctaaagaagcacctgatgaggagaggggaagcctctcccaaagctcccaaccacttcagaaagggaaccactcagccacaggtcccctgtgagtgtctctgaccagcgatggggcaggagtttgggtacaggaggcaggtatgggaaaaagaggcccagtcctgctgctgaattggtgtacgaccttgaactaagggtttctactccctcggcctcagctgtcccagcgttgagagaatgcagcgagttctgtgggtcaaaaatgggctagaggccgggcacagtggctcacgcctgtaatccgagcactttgggaggctgaggcaggcagaccacgaggtcaagagatcgagaccatcctggccaacatggtgaaaccccgtctctactaaaaatacaaaaattagctgggcttggtggcgcatgcctgtagtcccagctactcgggaagctgaggcaggagaatcacttgaacccaggaggcggaggttgtagtgagccaagatcacgccactgcactccagcctgggcgacacagcaagactccatctcaaaaaaaaaaaatgagctagatgggggagatgagaactgtctggggttggggtaggataggggtcaggagaaagggctcattagagctctccctggtccttcacagctggaaaggagaacatagcaccccagcctcagaccccccatggggcagtcctgctggcaccgacaccccccgggaag

SEQ ID NO: 19 - DNA, 7563 bp, Homo Sapiens
gccacggcgctcggccaacattaaatcttaagtcttaaaaataatcctctttggttccatgtctcacttccagacatactgatgtggtgaacctgtctccacagctttgggtggccctgctcccagggcagcttgatacctggcttgcatcctggcttcctggggctagagtcacacactggctgctttactgctctgggtcaagggagctgacctaccccagctctgctgagcgttgggcttcacagggactctctgtggtgcctcacaccctcggaggcttttgcactctgcgcctttataagggcactaattcccttcatgaaggctctgttctcagaacctagtcacctcccaaaggcccatatccaaatactatcaattgaagattagctttcaatatgtaattttttggggagacaaaaacattcagaccataacaaccctaatactatctataactacatttaatatactatgaactcaatacttcaaagacattgtcagattggattaaaacaaatgttctaatgcttacatgggacccacattaaatacaaagacatagaaagatttaaagtaaaaagattttttaaaaaaagctgttccatgataatattaatggaaaaacagttaatgtagctgtaatgatatcaaacaaaagtggccacatacagcaagtaggaaatggctgggcgcggtggctcatgccggtaatcccagcactttgggaggccgaggagggcggatcacgaggtcaggagatcgagaccatcctggctaacatggtgaaaccccatctctaataaaaaatagaaaaaattagccaggcgtggtggcaggcgcctgtagtcccagctactcaggaggctgaggtaggagaatggcgtgaacccgggaggtggggcttgcagtgagccaagatcgttccattgcactccagcttgggcgacagagcgagactctgtctcaaaaaaaaaaaaaacaaaaaaagagaaaaaagaaatagaaacctagttaaagatgttataatgataaaaggtaatatatacagataatattataattatatgtgatatattctatattataatgttaaatgtatgatcatttgataaaatcaaataacatgatgataaaatcattataattaggctatcaagatgaaagggtaaattccacaggaaaatatagcgatcttaaactcgtgtacccttaataaaacagcatcaaattatgtagtgaaaattggccagtcatggtggcttgtgcctgtaatcccagcactttgggaggccaaggcaggcggatcgcttgaggtcagaagttcgagaccagtctggccaacatggtgaaactccatctccacaaaaaatacaaaaaaaaagaaaattagctgggcgtggtggtgtgcccctgtagtcccagctactcgggaggctgaggcaggagaatcacttgaacctgggaggcacaggctcccaccaccacacttcagcctgggcaacagagtgagtgagactctatctcaaaaaaaaaaaaaagtaaaattacgtagtacaagttgacagcatataatgaaagcgtaagtagagaaattcacactcattaattgaaattccccccccccgtcctttcagtaactaatgagacagttagataaaaatatcagcagaagccaggcacggtggctcacacatgtaatcccagcactttaggaggctgaggttggtggttcgcttgagctcaggaactcaagaccagcctgggcaacatggtgagatcctgcctctacgaaaaatacaaaaaattagcctggtgtggtgatgcgcacctgtaatcccagctactaggggtgctgagaggggatgattacttgtgcccaggaggttgaggctgcagtgagctgcaattgcaccactgtacttcagcctgggtgacaaagcaagacccagtctcaaaaaaaaagaaaaaaaatcaatagagaaatttgaacaacatagtaagtttgactagttgacatatgtagagttttgcacccaacaagtgcaaaacaatttttcaagtacacatgaaataattagaaaataactatatactggggagtaagtttcaaaaaatatctatgaattgaagtcatattgagtatgttctcagtttacagtgtaattcaactggaagtcaacaataaaaaggctagaaaatctccaaacggttgaagatgatcaactatatacatacatgtgtatatatacacataaacatatatggacacacgtgtatacatacgtgtatatacacgtatatacacatgtgcatatgtgtatacaaacattcacacgtgtatacacacgtgtataaactatatacatgtgcatatatacacacatacacacatgtgtgtatatatgtgtgtatatacacacgtgtgtatgtgtatatacacgtgtgcatatgtgtgtgtatatacacacaagtgtgcatatatgtgtgtatatacactgtgtatgtgtgtgtatatacacgtgcatatgtgtctgtatatacacgtgtgtatatgtgcgtgtatatatgcgtgtgtatatatgtgtgtgtatatacacgtgtgtgtatatatgtgtatgtatacacgtatgtgtatatagttgatcatcttcaaccgtttggagattttctattatatatattttttctttaacattatatggtgttttatcatatagtgtttcttacggacatagcttaagaatcatctgttattttgtttcacagaaagtgtgaaactgcaggggagccgatttgtatagatcctggtaaaaagataattgagtaggtaaattccagggagcttttggacagtggatccccctgtcagtggttttggagtccctagtttcagttactcgtggtcaactgtggtctaaaaatattaaacagaaaattccaggaataaacagttcctaggttttcaattgtgttgacttctgattggcgtgatgagatccagccatcttactccttcccacagaaagtgagtcctccctttgcccagcgtttccctgctgtctacaatatccacctgttagtcacttcacaatctgggttattagatgactgtggcaatgaccagtgtggtgtcttcaagttgccttgattttactgactttttgcccttatttctctctggctccaaagtgcaagagaagtgatgctggcaattcagatatgccaaagagaagctgcaaatgcctcctttaagttaaaaggtaaaaattctggacttaataaggaaagaaaaaaaatcatatgcagaggttgccaagatctactaaaaacaaatctatccacgaaaatgtgaagaagaaaaaagaaatgcatgctagttttgctgttgcatcatttttggatggaagaacagaaacatgttcccattgaccgcaatgggtactatccatggtttcaggcatccactggggctcttggaacctatcccccataggtatgggggggctactgtatttctggccccacagtcttctactgccgactttaggtctctctggatctcaggcccccttctctaagatgcatcctagaggaccaaaaatacactttatttgggcttcgcctgcttttgtggaagggtagtttactagaggatataatctcgtgttttaatttgctctctctcctaaaggaaatgtggagaaaaaaaaaaagcagaaattggaaataaccaatatttagtttatttcattcgattcttaggggaactggtgaggagcctaagatgattttcccttcctagagaaagaatccaaagtccagggaaatagcgacaggggagttcaagactgcccctgctagtccttccttggctactctccgctgcgatcgcaggatagctctcattagcaggagaatcgggcaagtgtgtggataagtagagagtgtgttgaacaacttgtaacgttttatgaaatacgcattgtcatggttccctaaaaggctttgcggaagccgtttgtctttactaatcaagtctttacttacacaaaagtagaagtagaagtagttttagaaaacatactaacaatcttctatccccttgaagaccagagtagcagaaaacaggtgatttgcattataaaattgcactcactttttcctcctttcagatttcacattacattagcctatttgtgttacggtgtataaaaaatggaacaggcgcctccactacattgttctcctttaaaaatagatcacttacaccctaactttgttttccttaaattcgattcttaacaggagagctttctattatttcagatggagtgaggttgcacgactgggatggaagaaaggaatcccttaaatttgggggaatttctgttctctgttctaagaccattttacttggggtgtgggggtgggcgcggcggtcagggcagtggaacgcagtcgcggctgcgccatccctgcacttccaggcgcgcgggagggaccggcggggacgcgagctgcggactctggcgaactcgggggaggcagacagggggaggcggacacccagccggcaggcgtctcagcctccccgcagccggcgggcttttctcctgacagctccaggaaaggcagaccccttccccagccagccaggtaaggtaaagactgctgttgagcttgctgttactgagggcgcacagaccctggggagaccgaagcttgccactgcgggattctgtggggtaacctgggtctacggaagtttcctgaaagaggggagaagggtttgcatttttcctatggaggattcttctctctctagcatttcgtttgatgtattcaactggtagaagtgagatttcaacaggtagcagagagcgctcacgtggaggaggtttggggcgccgcggcgccacccccacccctcctcgggaccgcgcctatttctaaagttacacgtcgacgaactaacctatgctttaaattcctctttccagccccgtgagtccgcggcgacattgggccgtggggtggctgggaacggtcccctcctccggaaaaaccagagaacggcttggagagctgaaacgagcgtccgcgagcaggtccgtgcagaaccgggcttcaggaccgctgagctccgtagggcgtccttgggggacgccaggtcgccggctcctctgccctcgttgagatggacaacgcctcgttctcggagccctggcccgccaacgcatcgggcccggacccggcgctgagctgctccaacgcgtcgactctggcgccgctgccggcgccgctggcggtggctgtaccagttgtctacgcggtgatctgcgccgtgggtctggcgggcaactccgccgtgctgtacgtgttgctgcgggcgccccgcatgaagaccgtcaccaacctgttcatcctcaacctggccatcgccgacgagctcttcacgctggtgctgcccatcaacatcgccgacttcctgctgcggcagtggcccttcggggagctcatgtgcaagctcatcgtggctatcgaccagtacaacaccttctccagcctctacttcctcaccgtcatgagcgccgaccgctacctggtggtgttggccactgcggagtcgcgccgggtggccggccgcacctacagcgccgcgcgcgcggtgagcctggccgtgtgggggatcgtcacactcgtcgtgctgcccttcgcagtcttcgcccggctagacgacgagcagggccggcgccagtgcgtgctagtctttccgcagcccgaggccttctggtggcgcgcgagccgcctctacacgctcgtgctgggcttcgccatccccgtgtccaccatctgtgtcctctataccaccctgctgtgccggctgcatgccatgcggctggacagccacgccaaggccctggagcgcgccaagaagcgggtgaccttcctggtggtggcaatcctggcggtgtgcctcctctgctggacgccctaccacctgagcaccgtggtggcgctcaccaccgacctcccgcagacgccgctggtcatcgctatctcctacttcatcaccagcctgagctacgccaacagctgcctcaaccccttcctctacgccttcctggacgccagcttccgcaggaacctccgccagctgataacttgccgcgcggcagcctgactcccccagcgtccggctccgcaactgcccgccactcctggccagcgagggaggagccggcgccagagtgcgggaccagacaggccgcctaggcctcctggggaaaccgactcgcgccccatacccgacctagcagatcggaagcgctgcgactgtgcccgcaggttgaccttgccaagccctccaggtgatgcgcggccatgccgggtgaggagaactgaggctgagatcgccacactgagggctccctaaagccgaggtggaggaagaggagggtagaggaggagggcggtattgctgggaaccgccccctccctgccctgctccctgctgccccacccgagccctggcagtctggaacctggctggagtcggaactctccgcgccttcgaagggaggcccgaggacgctgccggcgcccccaggcgtcggctccgcgcggcccctgctgtagctggcgcacagccccggcgggtccccttgtcctccgcgcgctctgggaagacggtcaggcgcgcgcgtttggcgcccacccctgtgagacccgcttggcctggcgccgcgggcggggaccgctgccgaggccgccagcgcctcttcaactggggaaaacacaacaactcgggatgccccatcggagtgtgtatacacctgtgtgtgtgtgtgtgtggtgtgcgcgcgtttgcggaggcatgaaatgcggggaaagaggctggcgcttggcagtgactgcctagaatatgatacgaatagtgatccttctttctgtctgcccctactccttttctttgccttttccctttcctatccgtgatctcccctgaaaatgtcagactcccggagcaaggaacccggagtagcccgggcgcgcggttccggcgccccctggaggagccagcggccgagtgcttagcgtcggaggatcgcggggctttgtggtggagcactccggctgagcgcgcttcacagcgctgtggcacactggtcatcgttgcttatagaggatgccaagccccacccccattcccccaattggcctcgtctcttgtcttacttagatcagtttgttgtaactgttcatgtgtgtactgtttttcaggactgaaaactttataaataatgtacatgtcctaatctcacgagttgccatgaagatcaaataagataaaaagaaatgcgatctattctcttgtgttccctttctcctctgcttccttggctccgccttagggagagcaggaagcagggatgaccgacggcttcaggttttctctgctgtacttttcacagggagctgtggattacctgggctttattccttacttgtagacggcatccggtaggtagtcccggtaaaccgggtaaatactgg

SEQ ID NO: 20 - DNA, 5849 bp, Homo Sapiens
attgcaatggcacgatctcggcttaccacaacctccgcctcccgggttgaagcgattctcctgcctcagcctcccaagtagctgggattacaggcatgcaccaccacactccgctaattttgtatttttagtagagacggggtttctccatgttggtcaggttggtctcggacccccgacctccggtgatccgcccgcctcgacctcccatagggctgggtttacaggcgtgaggcactacgcccggccataatttttaaacatttttctgttggcacctgtccggaccatggatttaaatgatctactaacatgatgagaacccaacggggatacttcaaaagagacaaatgaatatacaggtggcccgaaatgattttataaagtcctctaacaaccacacttctttccagagtgccaaagaatttggctcatttaaggtgttcatttttcaaaaaatggttatacaaatgcaaacttcattcaaatcaaaccttaccttgagcttgttaaatgccatgtttagcatcactcaaggcttataccaattgttgttttaaaaaattacatagtgctttaagtatttttacatcttaaatacaaaggaataattctaactgtggaatcagagctgtcttcctaagacaaaaagacaaagacaaatatcacaattaactattaactggagaaacaccttttcaaacgtccctgtaacaactggatgtgttggacagcataaccaaactcattaagaatagtgtgaaaaacatcaccattacctagttctcacacacagataccttcttaaactatcgaaacctgtatctgaatatacgaagcattaagaatctgcttttgaaaaggaaatgaatatctgaaggtcattttcttttcaatcttttctcatactaataatcactgttaatatccacttttaaaaaatcgcctctatcaggcacccgggaattgcttaacaaaagccacttaatgaaaccacagttcagacaaaaaaaaaaacttaactgcatagaaaatatttatgagtttactttcctaactcatacaattgcgtccttgtttccaaagccttgcaattcacatcagcgggaacaaaaaaatctaacacacagcagaaagctggctctctaaaagaaagcatttttttttaaaggcaatgaaggaccaaaaactctttcttttaaaaagatcttagaagttcctcctccagagaagacagaaaacactgacaaaccgcacattgtgcagatgttcagccccgaaatgcagcctcgcagcccttcactccgcagtccaccggttgcatctgcacctccgggcagcgctcctgcagggcgcaaacacccagagacccagggacccggcagccccgcgcaggcctcccgcgtgcaccgctcagcgagcgggtctttcgcagacggcgggatgccccaggagaccgcgaggccggcgcagcccggcgagctcccggagggaaggcggcgtgtcagaaaggatcggaccccagcaatggccccggatcggtcccgcgcggtcgcctccttttcccgctccgccgccgggacccccctagccagtgctgaatttcccaactgggaaggaccgagtcactccaccctccgggaagtcgcgcgctcatccgttttcggcagcgccggagcccgagccggggaccgggcggacacccacagagtccgcaccgcagcgcgctgcacgctctcgcccccgcccgccggcccgcgccccagcgaactaaccgcaaagttggcccgaagtggcgacggcgctctcgtggagctcacccgccgtctcagcgcgcccccgagcagggaccgggcctgccggggccctcgccgggctcgcgcgtccgcatggtacctgccgcacgagccgctcccgcgccctctccccgcgcccggccgcccagctcggcgccggcgcctcacgctccccgagcgcaggagatccctccgccccggccccgcccgccggcgccggcgctcatttctcgggcgcggaaactcgagcccactttccccggctgccggctctgggaccgcgggctcggccacgcagtcccgcccggacccaaagagccccagtccctgcgaacaccaggtccgtgctgggagacgagaaggcgcccagcggggtctagcgcggctccgaggggcagggcgaggcttgtgatgccgaggttagttacggccagccacaggcgctgtgcaaggaattggggaaagctccctgccaagaaagggaaacgttagcttagctaaaaaaaaaaaaaaaaaaaaaaggctggggcctaatgagaaagcttcccagaggcatccctttagcttttccatagccttctgggagcccctgaatctgcatttgaatggcgcggctctgggtccgcgaaggtttggtgggctgaagtcgtccttcaggtctccaaaggaatgcagctaggtcggaatctacttcctccttcaatccccagaaaatggaaacgcttcccccgcgacctttttctgccgagttagaccccaggccctccccgccgcgggcgcctggcctcccccgctgacaccccggacgcccaggcctgtgggacaaaaggcagtcgcggcgtcccgcgggcttcctagcccgggagtcggccccaggggccccaaagcgtgaccccaggccgacaactgcaagttcctaggcagaggggaagccccagcgccgagaagcccgctccgagaactccccgcgccgggcgcccagcctgagcgtcccgggcgcggagcccatccccggtgcgggcagggctccagccgcaggctcggcgcagggcggactcggccgaagcccggagggccggaggcgctgggacgcagcccggacaagagggcggacttgatctcggaaagtttgtgggactcaggcattttaacactgggaagacaaagagatccgatttccctgggactggtgaggggagcttggcggggaggggaacggcagggcagtcaagtgtgaaagagaatttcctgggttcaaagttaacgcagtcaccttataagccatcttagaggtgaccggaaaaaataataataataaaggtgtctagcaggttgtggctgggaaggaaaaataatgcctgcaagatgagtgtgccgattcgtagccctatattccctgcccaccagttggaatacacatagattcacacatccagcaaatgcaaactccatcatccaaagacgtgtttgtcccggccataattgctccaagtgcttacaggtcaatttcatacatggaacacctcgaaagtgggtgacctgatctccaagcccaaccggcttgtgccgcttgccgaattgtaaatctcagcaaaacccaaacacaccggaactccagccgtttcctgggagcgaggaagcgggagtaatgctaaaaggggaaaagaagaacagtaaaaaaagtacaaagataccattccctgacgtaaaatcacgggattttttttaaatggcacaagagaattcctggagaagattaccattaattaataagtaataacgcttcctagggcttactagatgttttacatctgtctgggaatcccgattttccaggctccctgagaaatctatctgcctggaagaagttgcacttcgtcgccacaggagccgccgagagccagggatggagatttcagacttaggactctgccacgattctactgatccttaagcgccaacagaacgaaatggacatgcctattagctaccacaaatcgaattattttatatgagagagagaaatgtggttcaagttccacatttgtcctttaaataatcgaccctccctaaccctgtccccaaaggctcgtggaaattagggagggggttggggagacggttccagaaacaaaacgctttcctccagcacggcctctacatccagtccacccaagctgatttttgtaactcatataaagaatgggcccgggtgggtggtcagtgaagactggggtgagcaagcgcccacgtcgccgagcgccggggaggtccaggttcgcctccgcacagaaccctgcaaggagcgcgcctcgccaggtgcccggactagagggcgctgcgcccctgcaaatctcgcggccccgatgcgccctccctaggcaccattgctataataagttacattcaaaataatgcacaaacagcatcgcctctcaagttctttttaacagtgctctatatgtattttatgaactcccaaagctatgcatacgaatctttcatcgccgatccgcacaaagccagagggatgcgcagctcctggagccgagaacccgtagggcgcacacgcttccccgcactcgcttagagccacacaccccacgtaatttcattaacgtttaaacttaaatgccaaaaggcatgcacgatttgaacaaagaactcaccagtctagccgagtcctcggccctgggctctaaagtcctcggcagctccgtgatcccctcgcggtgtagatatgtgttaagagccgggtttgaagtaccaactttgcctccccgggatcttcagcatgtccctaaccagagtgccaacgtccgtgccgccgggacccaggcggccgcatctccggaggcttccgaccagggcaaacttaagcaccaaacgcaggcgaaaagagagtgcgcggggccggaacgagggcccgggagcagccaagtttgtcaggacgtgcccaggcagccagccgccgagttgaggagttgcggccgccggctgcggcgactcgctgcctctttccccactccctcccccttggaggcggtgggggaggggaggtgacgtcagcgccccgcctcgccccccgccccgggcgcggacgggattctccggctgggcgcgccaccccgacagtggcagcagcggccgtggaggctgcgggggtcccggcctctgcggtctctctggccggccgcagctgtggcgcgggtgaaacgcccgccctcctccttcggctgcgtctcccgggcgccggcgagcgcgggcgttcctcgcactcagcgcctggagccgcctggagccccgctgcgcgcacttccccggctcgcggagcccctccggcggcgtttcccacgccgcggactgcaggtgatgctcttcctcttctgcagccgaaattcgtcgcgatgtgtcgcctgccagatttttgctgggcggaagcatgaacagtctctgcagactggcctggacgacttgtactttgtggccctccaacttctggatgtgaattttttttcacgacttattattatgctcttcgtggtctttgtgttgaaaatcacggagctgtatttttattttcaaattctttcccaatgctcctcttgtcttgaccgtactctgaagcttataaggttctgagaggagggggcgaagggataggggaggagccagttcctaatgtgtcttacaagtcatccctagtgataggggctaatacgcaaatcactgtctcctcctcgaaataatatccatttagataaatgcaaacactgttgaggtttaatttataaagaatgcgtcgtctttatgtaagtgtccagcctccaggaaaatatctgctgtggaatatatttttaatgccactaaagtaccaaaatacctccccgaacagcgtgaaattccgagggagccatttctgtgagttgacattgtccccagaagattgtcattaacattcaagatccttgcaaaagggggctgggggcggttctatcatatttgcatccgttggtataaatatgttgatcagtttagctggtcgttctttta

SEQ ID NO: 21 - DNA, 12201 bp, Homo Sapiens
caataactgtgcagttatcgtttccgcacgctgccaacaaggcagacagatgcagaggaaacgtccttacaattttctggaatgtagacacgaagcgcaaattgaacctctggcagatggcagaaaaggtgacttgacaatgagtttgaaacaattaaagtgatattctcattcattcatttccacaattttattcatttcgaggaaagcccagaggattggaacatggatataaaggaggacaacctaagactgcaagtttcatcttccgaaaggctgcatttataagcaggctgccagaggctgcgctttctttctcactctttgcatccaggagcctggaggatcttgctgcctaccccccgccccacgccaaccccatgagacagggacaccgccgccccttgtttagtaatcctcgggttgtctgatcactatcctctaggccagcgattggattcacctcttctttcgcgtacttacgggcaaccgaggccatccgaggccctggtcccgaacgaacttgagtagcgagagattcacaataaagaactaagtgtggcctcccaggggctgcgctcgccatccagggactgaaagagacctgcgggatgattttctgttttcctctagcaggaatcagaacaaggggcgtagattcggttcaatttttctgcttcggtcaatgggaagatgaaatagaaaaattctctttcactcgcaacacggagacttagggggctgtctagctagaaggttggcaaactgcaaaacggcggggcagggggccaaggggacggttggggtctctttgtttagctcttctctcatcccaggactcaggctaggctaaatttctagcgccgtgtgtgcttgaaagcagacaggtgggattcttggaaagaacatacacaacacagcttctgagccccagaaggaccttaagacaggagttcctgagccctgaacaagaggctacctagggtaaagcgattgatctccgcgcggtgcggctgagaagagaaggcgttgttgacctttcggggagcaagttaataactcagccgagttgatgaagtgacgttctttctgaaaggggtcgtctcctgggccccttttctcagtcggcatttagcaggtagggaggcagggcaaattcttctctccacgtgaagtcacaaagaattgatgagtttcaacagcatggatctgaagtcgtagataattctaaacacacccgcgccagagttcacactcttgttcatctctgcggagttggagcagacagcgaccttcaaaattgtccctaaaatctctctcgaactgaccgggcatttactgggatttgaggggtttttcttcagcttccaaactactgttacatgcagaatatactggtagatgccaccaatgattgcccacctctctttaaaagttgccccgtccacgcaccattcagcttacactaaactgtcccgacatgccttagccgtcagtttaattcataaagtagctgtaactcttgacatcacctccgcagcccacccgaggactccttcccaggacaccttatgaggctgttttccgagggctgaattctgagacttaaaggaaggttacttgaggcatcctggtatatttccgggcttccaactccctcccctgcttggctggtaattttctgctgctcctcctcctcccccacttgacctcctccgaggtaccttcgcctcccctcccccgctcgtccccagtaaatctccagcgggtgggggaaatcaatcctttggcgctaaagctaaactcagagctgcccgttggacaggattgcagtggggtaaatggtgtccgtcctttcagaaagaatgatcaactacatggaggtaacttgctctgggtttcctgagatctcgggcggacccgtccgtgttttgccagattcagtgcaaatgtagatttcagctgaaccggtcaggacttgagagatagctgtttcactctccggactgcaaccacttccgcgagaatctgatacatttaatgaaagctttgccaaatgtacgggtcagcgcgtccttgggccaccaccacttgggtcagcacactgcactcactagcgccaacctgggctccacgcagcagaactcggttaaaaatcgtctgttcctggtcacttaggagttctagggggcagggggaagcaagaaaaaggtttcacttgacactgccagccgcttttgataagtcatagtaaatactttcagaagcacaattttaaagggagaatacaaatttccgtcctcgcttggccgaacgcctccctgcaatcaactgcggaccttcgcatgctcaggactgaactgaggtttgtggtttcgcagctgccccgatgccgggagcatgaaattctatctcggctgagaaccgagcaacagaccgcacaagaacggtgccttctggcctgtcgtctgccaagaaataccaggaaagctggtgtcagaaacaactacctgaactcagaaagtaaggctaggaagctctgcgtgcagagaaaattcttgctaattcacccagactgttttatctggttaataaagcaattgacactcaacaaaaccacaatcgcagcaggagtcctaggcatcagaataagaatcacaactaaaggtttgttgttgttaacaactgcctttattatcattgcttagtatttttttaagtaaaaggaaagaaaaagagaatcatttcatacccactggtatctcttccttttctctgaaattagagcacagattctcctgattgttcctcaataagccaccaccaccaacgggaagagacgcaaattggttctaaacacccacaccccgttcgcggtggaatataaatggttaatcgtaactccctttaaacgcacataattttatctgacccttggacatgattaaagatactgaggatttatatagccttattctacatcattagagactacacagaaaagataaaaacgggaaaggggatacatacgcatctactcaatatccatttttagaggtaaataaaatcttcctgtttcattttggcccccaaattatatgatgtggacatcagaaaatataaatccttcagttatacatattttttcatctgaataccttactcagtaaaactggcagtgtaacttattctactctttcaaacctgattctgatgtgagctaaacatatagcatcatctccctgggaataaattctcaaatttatacctccattggaaagctgatcaaagcccctcttcccttcccagtcttggttagatgagaaggaataagctgtcttactgtttgtgatttcccaaagaaacaacttaaaattcatttatatctgccagaggttattgggagataaataaatgctaaatgtgtaattttacctttcaattgcaattaaaacctatttagatttttgaaatgtagcttgagagcatgatgtttgtgcaggaatctgtatctgacattaagtttgatgtggaatgtttaaatggtaactaaagcagagaaagcaacagtacacaaaaacacaagtctaagagcccatcaggaggttgggtgtaacagccacattttggaaggtgtatacaagggcacatgggcagatgccacagactccagaggaacttaaatttcagtatcccttttatattgaaagacactgtcagatatattgaggcagcctggaggtgatggggactacacttaataactactcatactcctcattttctcagtaaaggaatcaaaccagagattcacactattgccgttttcaaggatatatttttgacctaacaatatacaaaggtcaaaacgagtccttttttgagaggagagggtctaatccccgctttgaacacaagaggtcgctcctgtgatcaagtattacggataaattgctcatcagttttatgtatacaaaattttacagatatatttgatgcactaaatccacatacagcaatcagctgaggaaatcataataatccatgatcaatttagaacttcaaggtaaagtaaaactacaaagcctgctattctaacttggattttaatgcaaaatgtgtcatgatacatgcactgaacttcagagcatgtccatcatggtggggtccctcaaacgtctccttttaatgctggtatcttcaccatgcgtcttgcttctatcagtttaggaacttattaagaaaatacttgtttacaacaatggtgcagaatgaaaagaggaaaatgttgtcttcaccattaaggtgaaattgtctattactaaaggtttcccccaagccgcatgcaagcttttctacttggaagtgctatcatctgcaataattctttgtaatagcttattggtttagggagttaaaataccacactgtgggtgggaggtgggggctggtttgaaggaggatggatagtgagggtgctttgtggatctcaaatgtaagtcatcaggcttctggtggcttctggtgtttaattccatcttataaaagtggcatgatggaatatgactaggtaaaactctattttctggcattgtggtggtatctttttttttttttttttttactagggtcaacatgtttatctctatgggaaacacacacaaatactaggaagatttgcttcgtattgagattaacagcatcagctttgcaaaagcagcctgacaaaaggctccatacatctaataccagagactagaaacagaccaaaaaaaaaaaaaaaaaaaaacacacaccacacaactggtaaacttatcaacctaggtctatccaactttcgctttcatacacgcgctctaaaacaacttataataaaaatggaagggaagacagatccaatttgaaatcctccttgagaaaaaacaaatcaaaactagttcctggggaagaaagcctcagctaggtcaggaggaaacttacgcatctttgattccctttccgctttggagaggcattacccgttcaagcccagccaatgcggccggccaggatttacagctcttatcaagggttagattttgcgaaagatataaagaaaggagtttcctaacacaccgggtcttctcacagcaacaagacaccgaaattaagccttctatggtttgtgtctgtaggactttttagataaaactggcagccccattagataagaaatggctttttagaagctttgggggaagcgcgggggttcttcgtggccttcctgtgactgtctttgggagaccgtaacagatgatgggaacatgtaagaatgattgaagaaggttaccggcgagttgcacctaacagtcttctctctccaagtagtttctcgagagaaaattatatattaacgcctggggacgtgaaataggtctttcactgttctgtaataaatccctccctactcgcgcccttagactaatgcatttttaaaaaatctccacaaagtcatggagacttgtccttataattaccaaaataccacagctagttgcacaagtttgcttaaaaacaaagggcaggagaccagcagtgagaagaattgaacagtatataaaaatcttacaaactttagactactgaaagatcatttcgctctttggcttcgggttagtgagcttcaattctagagttaaactgagaagcagacctcgcgggtctgaaagacaaaaagtcagtccgcggagtcaacttcggtttaccggtgcgttccaacctgattgtcccaacagcaagaagcgcccctttcctcccacccaacgtttttagatatctgaggttgggggagacggagtaatggtgtagcagtcaggaaacagttcctctgggtttaatcatcccattcccgattcttcttcccctagcgcgccgagcgcagccagttctggaggaactagccctccggagcagccaaggcaggccaggccccggggatgtgcaccacggcgtggggaccaaaccaagctgaacggcctgctccaagttccccccttttcctagagcccgggagggacctcgtcaacaggtagacctacccaccagccactcgccaccggcggcagaaagtgagccccgcgcgcaacgcggccagccggactgcggggaccccaggagcgcagggcggaggagcagcgccacaggaggcgagggcgcaggcggcgcggccgggaaggaacgcgggaggggacagaaggaagaggaagaggaggagagggaggccagagccagaacagcccggcagcccgagcttcgggggagaacggcctgagccccgagcaagttgcctcgggagccctaatcctctcccgctggctcgccgagcggtcagtggcgctcagcggcggcgaggctgaaatatgataatcagaacagctgcgccgcgcgccctgcagccaatgggcgcggcgctcgcctgacgtccccgcgcgctgcgtcagaccaatggcgatggagctgagttggagcagagaagtttgagtaagagataaggaagagaggtgcccgagccgcgccgagtctgccgccgccgcagcgcctccgctccgccaactccgccggcttaaattggactcctagatccgcgagggcgcggcgcagccgagcagcggctctttcagcattggcaaccccaggggccaatatttcccacttagccacagctccagcatcctctctgtgggctgttcaccaactgtacaaccaccatttcactgtggacattactccctcttacagatatgggagacatgggagatccaccaaaaagtaagaggctattttaccttgtggggctcggtgtgctgttcttgtgcggggttctctctcaggcacaggctgaggtgccaagggctctttggagttggagtcattgcctggagaaagagaaaaggtggctttttcttgttgccgccacgcctgcatgcttactgtcggttcttatcttcgggaaactgattgtaccttgtgtgtgaattcgcctgtgtgccctccaaagctctagctttctggtgctaagcggtgatttcctcctggggaatcctgagctctccgagaaggttattatgttgcaaaggtctgcctgcacagtcaatgcccagagatgtgaattagcattagacttgcaaaagagaacgagtgacaactgtatttatgcctgctcttgctaacaatatccagtcctgtgtgctatttaagagcgcgcttcacggaaaatatagacatccctgcgttcacttaacgcttctagtcaaaaccttttctttgacttgacttatccataatctttcccaatgattatagcaaagaggaaggggggggggagaaatacaaaatgagcgggtttgattgcgtgctaggcgtacaaatgtagactattccaatctgcattttacatatattccacctccttttaaaaatgagtcaaggttttgatggcacatttcaattaccatcccaaagtgcaatgctctaaaaaaaaaaaaaaagaaagaaagaaagaaagaaaaaaacctcccagagtacgccctataagagaacgacactaaaagtgtgtttatctctgtaggaagtaaacggttagtcaatcatgtatttattttcatttcagaaaaacgtctgatttccctatgtgttggttgcggcaatcagattcacgatcagtatattctgagggtttctccggatttggaatggcatgcggcatgtttgaaatgtgcggagtgtaatcagtatttggacgagagctgtacatgctttgttagggatgggaaaacctactgtaaaagagattatatcaggtatggcatttacacttctttcttaattttgtgggatttccctgaatctccccactctttatgtattatttggtgtggctttgtctttttgtgaagtttgcctcagtgtagtcatacaagccaaagttaccctgtacatgtgttaaaaaaatcaagctatgctgttcatttcattctttagttgagaaaaacaaaaacccttaacagtggtattcataattccggggtattgaggcttgtttaattactcttggagtttatgatgcacaaattattttcctctttcaccctcccccttacaaaacaaaattttaaaaagatggagaagtttggatttttagctttaaaatagggttgatttttgttgtatagtgcagtgttctgtttgttttagtcctttttaaaattagtagcttacaaattctttggtggcatcaatgcaataggtgaaataaaagtttgaccgaagcatgtttagagatgtactttgaaagagcgagtacaggtattgctccttttatttttggggtaagacctccttctgagaaaaatttaaaaccaacctaaatattccttggaaaaaacaccggaaacttaatctttttaaatattaaccctttggtgacatctaactgtctcttctttcttatcttatctgagctgatgaattagagcagatcaaattgcccatcatctgtctacgaacaattggtatatttagataattgaacagcttcctttctcacattaaaatctggtaactgataaaatgagcgaattgtccaaattgacaagactgaaacaacataggaactttctgagtttggttttgttgttttggagagtttttgttttttttttcctccaatttattctgcaacacgttttgctaatctcaagtttcctctgacttgtgtgtatgtatcagaaactttgttttctgccttagaaagccagtagtctctaaagaaaattgtattcattttattaacaaacagaagagacatcagcatcattattatgttaaataatagcaaaatatcactttttaaatgtccggtggctattaacaagtaattaattagcttttgttaggcaaatggtttctggagcttgagaacttttattaaagtttagttaagatttaatatacagtcacagtttgctcctgctcacttagtatccagcatttttttcttcttttttaaaaatcatgacacagagagtataatcttggtagataaaattaacctggttgggggaggttaatacttcggagagggagtgaaaggaagtaagggaagtcggggtacaggaagggggagggattttctaaattgtttggtcaccgccaaagtcaagtcttcaccctatgaaatggaagatctcacattgagtaggcggagggaggaaaaacttttgagtccaccttctaacctctgacaaatgagcgttttcattgtttactagattggtgtgtaaacgcaagattctagagaaggagagcccacttcaggagtatctttactgctatggaaatagtattttgctcaattgcacacaggcttgcatgtgcctaattctggatacacacatgtgtagaaggaactaatcatttttaccttctcttcactctctctcaactctgtgtgtgtgtgtgtgtgtgtgtgtgtgtgtgtgtgtaatcttgtagttgtaaaagcagaacagactggacagttagatttccacatctctccttggagaagcaggatgcctcctcctgttatgtggatcttttcctctctcttccattctttctgttcgtaggaatgccccagcttctgttattcctgaaagatggagaaggggccagggaagtgcagcctagatggaacctataaagattgtcccttggtaaggaaaggccaggagtgagaaagaccttagaagcgggtctttgcatttttttcattctggtcatggttttcaagaaaattgaaatgaggtagatgattcagcaacttgaaaaagattgagggaacagacgcagatttttttaaaaaaataataatacaaggaagaatggagaggaaattttctgttaacattgctgcctgaagaaaatctttagttggagaaagactggaaagtacttgtgcaaaaggagatgtggaaactctcagaggtttcattttgttattctgcttgtttatttgtgagtgtttgcaaaccgagtggggtgacaatccccttctcctacctccttttttcttggaaggaggactttttgttgcagttttagacatttctagcagcagaaattgtgggatagggaagtgaaagtgttggtgtcggtggccaccagagtctttctggattccttcctgccaagatctgcaagatcaacactgggattgattgctagagcagcagcccgagtttggaacccatcaatacattttctgtggtacaagctaggtgttttgagctaagagttaccaactaagacagaggttcatcggaaaggaaacgggagtaaaagaaagggaggagggagggaggggaaaagagagatgggggaaggaagagagacagggaaggagagagcagggtttcatttctgtccttctgtttccaacttctgtttggaaatgctgtttacttggggcgtcttgcccgggatcttgggccagggaagtgccggcctgaagtgaccccctcttcctgtacttctctccccgctctgggccgcctccgctcccccctcccccgcacaggttgtacgggatcaaatgcgccaagtgcagcatcggcttcagcaagaacgacttcgtgatgcgtgcccgctccaaggtgtatcacatcgagtgtttccgctgtgtggcctgcagccgccagctcatccctggggacgaatttgcgcttcgggaggacggtctcttctgccgagcagaccacgatgtggtggagagggccagtctaggcgctggcgacccgctcagtcccctgcatccagcgcggccactgcaaatggcaggtactcctctgcccggctcgggtaggcaggcgccaggttaagccagcctgtgtgccagcggccacaacaactatggtagctacaggggtggtcgtagtgtttgcctgcagttaaatgaagtgttctgtatgcaatttgcgctgtgctctgctcctttgcagcaaggttcaatgcactcactgtctcccttgattccccgagcacacctacaccgtctgtgtgtctctatatggttacacataaatgtacaccacttgtgtacacgtgtatacacacgcccaaacattacttccagttcgctctggcctccaaaccttggcttgctgaaaacgggcttcagctcccagccaggtattctcctgctgcctaattaaaggggcggagccccgggtccctggagcttcatcctttaacccaatgaaggaagcttaggtggcctgaagtcatttagtctcccaaatcctttttccttgtgagttgcttcacactcgaaattttttttttaatttttttatctttctgtgagagaacaggactgaaaagatacagttttaaaaactgcaggccattgcacagagttgtaatataaaactgtcaacaagcttatctgcagtaattgccttttaaagggagcctgcttctttaaatcattcattctatatgatttggtgagaatttcatcttcaggcccatggttgtagctctaaattgaccccataggtgttggcctgaccctagggggttgtagaaggtgcaggatttgtatcatgtagataagaggactcattcccaaggaagaggagtggaaacacagcaaggttggccgggaccaaagcagtgggttagaaggtggacagtgtttccaaacctgacttcctgccatgaatagatctacccctttgcagttttaaagtatcaattcccactaaacactgaaggtgaggaaactatagccctcccttacccttctgccttctggcagctctaagaattctgttcagggggatttgtgactagtttgcaccggggcacggctggggtggtgctcctgttcagtggagcctgcactctgcttgtggggaagcacagaggaagctaaaataccgagagggaggcgggggacatctcccagccaccgtttatctagagcctaggcagctcaacagagtttccgttttccactgcttgggatcagcccatctcaggaacatccatgtattaccttagatttaatactaagagcagggattggagatatggcagaaatagcgaatctcttcagccccttcacatgactgtcctctcggactgaagttcaaggcgttctggcagagttctcgacct

SEQ ID NO: 22 - DNA, 22692 bp, Homo Sapiens
caggcaaccggtgaccaaaaacactttcaggcagtatcgagtgctaggaaaagggggcttcggggaggtgagtgaacattcacgtttttaattgaaagttcttacattcaagtcacctttcctgtcccttctaaatcaacctaaagggttggcccacgggtcccccgggggcaccagtggctcaatgtgggccccgggggcagtgagggtgggagagagtcagtggccttggggctatcaggtgtgtctatggtggaaagaggttgtggagctgggcaggtgagacagacgtgctctcctgccagcctcaggcaggatccagcctgcagaggacaaatgggcagccctggtcgtgtgtggggaggagatgtgagggcgtgaggaggctgggcaaccttggccactcagtgcctggatgacgctgtcatgcaagattcgagatttcgttgtacattacccgatcttcccagcatgtgaggcaagccttgttattcccattttagagatgaggaaagctgaggtccagaatggttaggtgacccagccaagggcgcgcagacaatgtgaggcagagctaagacttaagcccaaatgctttggttcccgcttatctggattatgaagtcagtgttcttgaggatctcctatcactgcctcccaaaacaaacttctctaccggcagccggtaggagaaaatcctgttgccctgggaatggaacggtacttggggccccagtcagttatctaagccttggtgtgagtggctcattctgccccttccagggctgggaatccttgaaggagaggaggagggagggcaagggcccaggacagctgtgggccccaggccaggcatcactgggtcctgggagcctggagcactcatgaagccaggcagggccggctctgaccccatccattctctacctgggaggcctgtggtccccgccctggaggagctcggggcaggcctccacggtgctcctgccaccctggtttctttcttgcactgcaggtctgtgcctgccaggttcgggccacgggtaaaatgtatgcctgcaagcgcttggagaagaagaggatcaaaaagaggaaaggggagtccatggccctcaatgagaagcagatcctcgagaaggtcaacagtcagtttgtggtgagtgagcatctgggcccagtgaccggctcgcccttctgtggactggggcttccctccctccggaagggcgtggtcctctaatgcggccggtccccacccctgggaaggggaatgccagtggcagcgctgagctacagaaaggccgcaagacattcctccatcacacggcccattgtggtcgactgtggctggctttgtcccatccccagagccggccagtgcctggctccctgctgtgcatgagaccgacgcctctgttctcctggaccactttgtaaactcctcagtggacaaagaaagttcacctgggcccaggctgggagctgtgggttccacagaccctctaggctggtgccatcgtggtggggaccttagtgccagcatcctggaatggcactatcaagtctgtgtgcattgtgttagtcagtctaggctgggccctgctgcagtaacacatttgccccaaaccctaagtagctaaatacagcagaggttcatctgtcactcacctgaagtccaatcagattgggccaccctcctccatctaacagctgccccatctggagccttgaaagtgagtgctaggggttccacacagagactttccactgcctctactggacagatgttcctcagtttcacccacagtctgccagccagaaccagtcaacacagagacaagttagtttcaggggaggctgggaaatgtgaagtgcatggatatttggtcagctctaatatcttctgctacacactgttataaaaaataaagctgggtgcagtggtacatgcttgtagtcccagctactcagaaggctgaggcaggaggattgcttgaacccaggatttcgaggctgcagtgaactatgatcgtgccactgcaccccagcctgggtgacacagcaagacctcatctctaaaactaaatacatgcatacattaaaaataatatatacacaaggtaaaaatttaaacagcacagaaggatacacaataaaacgaaaagcttccctctttgagtaatcactccaggcatgttttattcatgcacaggctttattattcttagccaatgggatcttcctgtacctcttatggaggaatgtttttcccttacattgtagatctttttctccatccagacctctagtcacacccctttttaaagttgggcatcattctcctgaagagataaagcataatccatatagtcagtccccatggatggaaattgttttccatctttaaaccactacagggccgggcacggtggctcacgcctgtaatctcagcactttgggaggtcgaggcagacagatcacttgagatcaggagttcaagatcaacctggccaacatggcaaaaccccatttctactaaaaatacaaaaattacctgggcatggtggtgggcgcctgtaattccagctacttgggaggctgaggcatgagaatcacttgaacctgggaggcagagattgcagtgagctgagatcatgccactgcactccagcctgggtgacagagtgagactttgttaaaaacaaaacaaaacaaacaaacaaaaccactacagaccagtggcactcccagaggatggaagtttgcatcttgggatctcatcccaggccacccccagctgccagccttgtcgggggtgcaggtgtgggcagtgccatggtatgtggagatgaggcagatgaggctaacttcagccatcatttcagctgcgggccttcttgagtccgaaaccttcctccccactgccagccgcttcagcagggacccctggatgctgcctatggagccttgtctctgaagggacagtgctggcgggttctgctcagggaagaggatcatgtgattcacaaagctgggtggcacgtctttaagggccttcagttacgatggctgcaccttctttaactgtgccccatccacggccccggcagggagttcccacgatgtcacctcctggatccctttctcggtgatcacctgggcagatgtgggagaaaggggacagctgcagccattgcagcagaagcacagtccccatgagcttgctcatccttggctgccattttatctcctttcctcaaaaatagctgatgttgatgcaccagttttacggcacagccagttcccagcctggcccacgatggccgggtttcatgtgtgccacctccctatgtggagaaggattaccttctggtgtaatttgcccctcctgccccaccatggccttgcttcacagagccttgggtgtctggactccaccagcagaggactagaccccctctcttggtggccctttgccaagtggaccagtgtattagtccattttcacactgctgattaagatataactgagactgagcaatttacaaaagaaagaggtttgatggacttatggttccatgtggctggggaggcctcacaatcatggtggaatgtgaaaggcacttcttacatggcggtggcaagagaagaatgagaaccaagtgaaaggggtttccccttataaaaccatcagatctcatgagacttattcactactatgagaacagtataggagaaactgcccacaattcaattatctcccaccgggtccctcccacaacacataggaattatgggagtacaattcaagatgagatttgggtggggacacagcccaaccatatcattctgcccctggcccctcccaaatctcatgacctcacatttcaaaaccaatcatgccttcccaacagtcccccaaaatcttaactcatttcagcattaactcaaaagtccatacatagtccaaagtcccatctgagacaaagcaagtcctttccgcctacgagcccgtaaaatcaaaagcaagttagttacttcctagatacaatgtgggtacaggcattgggtaaatacagctgttccaaatgggtgaaattggccaaaacaaaggggctacaggccccatgcaagtcagaaatccagcagggcagtcaaatcttaaagctctaaaatgatctctttgacctcatgtctcacatccagatcatgccgatgccaagacgtgggttcccacggtcttgggcagctccatccctgtggctttgcagggtaccgtctccctcctggctgctttcatgggctggcattgagtgtctgcaggttttccaggcaaacagtgcaagctgtcagtggatctaccattctggggtctggaggacagtggccctcttctgacagctccaataggcaatgccccagtagggactctgtgtggggtctctgaccccacatttcccttctgcactgccctagcagagggtctccatgagggccccgcccctgcagcaaacttctacctgagcattcaggtgttttcacacatcttctgaaatctaggcggaggttcccaaacctcaattcttgacttctgtgcactcgcaggctcaacaccacatggaagctgccaaggcttggggcttccaccatggctcgagcactgcattggcccctttcagccacggatggagcagctgggactcagggcactgggcaccaagtcccttggctgcacacagcacggggaccctggactcagcccgtgaaaccactttttcctcctaggcccctgggcctgtgatgggaggggctgctgtgaagacctctgacatgccctgtagacattttccccatggtcttggggattaacattcagctccttgttacttatgcaaatttaggcagccagcctgaatttctcctcagaaaatgggattttcttttctattgcattgtcaggctgcaaactttccaaacctttatgctctccttcccttacaaaactgaatgcctttaacagcacctatgtcaccccttgagtgctttgttgcttagaaatttcttctgtgagataccctaaatcatctctctcaagttcaaagtttcaaaaatctctagggcaggggcaaaatgccagcagtttctttgctaaaagataacaagagtcacctttgctccagttcccaacaagttcctcgtttccatctgagaccacctcagcctggactttattatccatatcactttcagcattttgggcaaagccattcaacaagtctctaggaagttccaaactttctcacattttcctatcttctgagcccttcaaactcttccaacctctacctgttaccggttccaaagtcatgtctacctttttgggtatttttttcagcagtgcctcactcttctggtaccaatttactctattagtccgttttcacactgctgataaagacatacctgagactgggcaatttacaaaagaaagaggtttaatggacttacagttccacgtggctggggaggccccacaatcatggcagaaggtgaaaggcacttcttacatggcggtagcaagagaagaatgagaaccaagtgaaatgggcttccccttataaaaccatcaggtctgtgagacatattcactaccacaagagcagtatgggagaaactgcccccatgagtcaattgtctcccactggtccctcccacaacacatgggaattatgggagtacaattcaagatgagatttgggtggggacacagagccaaaccatatcaactaggcacatcctgcatgcaagagaaagcctttaccaggccatgttccacttcccaaagccccactgcccctccagctcacccttacttggccctgtgagaatggctcccatacccaaaagggcaagtgagccctgcttttctgactggccaagaaggcaccctccagtcttccccagctgatgcacacatgtgcttctgtggaggaagcacagacgccattctgttggattcactgggaggtcggggtgctagcctgccctaacccgccttggccttctcaccttgatccactgaaagggaggagcaggtgtgagccccttatcagccaaggaggccgcaggcagggtcaccgcagaggccatctgggtgcaggggagcagggtgaggctcctctgttccctcacaccccagctcccaggatcctgaggagggaagtggaagtgagtggccattgtcacaacctccccatggcactgttcttgtgctcccaggtcaacctggcctatgcctacgagaccaaggatgcactgtgcttggtcctgaccatcatgaatgggggtgacctgaagttccacatctacaacatgggcaaccctggcttcgaggaggagcgggccttgttttatgcggcagagatcctctgcggcttagaagacctccaccgtgagaacaccgtctaccggtgagtggaaggcaccaaggacttccaagtctaagtccgagggggtggggccagcccctccacaccctcgggcaggtggttgccatcgctctgggaatcagccctggtcagcaccaggggaggatgcagagtcagacagactttccactccaggaagctggggcctccggcactgaggaagcgaggtgggccaccctctggccagtgttctccagcctccaaagtttagggaagccaagcaagtgaaatgatgttcctgaaactgactgctccttcaagtcaaggaggacgggccgtgaccactgctccctccagttgcctccatcccagcagccagggaagctgggagggggcctggtggccgctatctgggatcagtcctgggaagacttgggtcgggtcactgcccacaagcagaatcggagtggcccatggtcccactccatgctgtcctcagcttgctctggtcttcaccccctctccccacccacctcaatcccacagggacctggacattgtagggccaggggtccagattccactcacaatgagcagtgcccttcagatttttctcccagtccttctgaaagaattttgaaaaatctctgtgatgctgcattttaagtagacatttgaaatattccatcatattgaaatagtggcaatttttgatatattgaaattgaacagttacattacactcctcaggggatccagtggaatctctagttgctgtagccaattgatttccacctgcatttatccaaaaaatgcacagaaagctctttagtgatgaggaattttctatcatttccttcactctctccatccccccagaatgttaataatatatttttttgcctgaaagtctttcactgattagcgtacatctctgaaacaaatatatagatacatacaagagtttttgaagttctccttgaccgtaagtctctaagtgttaaaataacttctctggccggttgtggtggttcacacctgtaatcccagcactttgggaggctggggcaggcggatcacctgaggtcagtggtttgagatcagcctggccaacgtggtgaaaccctgtctctactaaaaatacaaaaagtagccggatgcggtggcacgcgcctgtagtcccagatacttgggaggctgaggctaaagaatcgctttaacctggaggttgcagtgagtcaagatcaccactgcactccagcctgggcaacagagtgagactccgtctcaaaataaaataaaataacttcttctgtcgagttgccattgtaattagtagtagatctcatttctaatcagtcctttggaagcaggggttttgacatctggagtgggtcgctacagtcatactcgggaggggaggaggctgcttttcttctgtaacttgggagaagagttattgagaaagggcagatgggagggagatcccaaaagatgccaggacagagcatcctgatgtgaagaaatccaaacccttcaaactgcggacaggagggaaccccctgctcggtcctggcagaccccgacacgcagcccagtttgaagacctttgcagtggagctcatcttgggaccaagaaggttttgaaaacaagaaagaatggtcttgatgacatgcccttccccccataccatccccccatttatgtttctgttttgttttcattcaaatgaaaagagtcaaaattttccctaagggttgaacaaagaattctctacgtgattgccttttatttaaaaagaaaaaagaaagccctccaagttccagctcgtcttcttccgggggaaagagaaccacagtgcctcctccctggctgtgaccactcaccacggcctctctttgggctccgttctggccagtgcccactagtgagctgccatgctagcctggtggcagccggcttgttgagatgatggctgctgcccttatttggaattgttaacacatcaaaagaatgccatttaaataacagcaacaaaagtattttatgataaataaggatacacaaacaccaattatcatttgatgaggctcactggctggatttgggtacattaaccactccgcatgaggacagctgccatcagttaaataaacaaagctgggtggttgagaactggagcctccatccagatcctgtgtactgtttgccccatggcttaactgagttgcacacactctcctcttggctgttcttttacccatagagaagaccttttcctataaaagcagctcctctgctggctctcccctcatcctgggaatgcagaggctcccttacttgtgagcaagatcctgtcatcaagagaggagacattagggacaggataaggcagccacacctatgccatgccccgtagctgttctttctcccaggctgtagcgtagctggtgttgggggatatgccagtctcctgcaggccccatcccaaagggggtctttttcctgtgtccccaccttctcccctttgatcctctcttcccaattgcacagctcccttcattccaggccctgttctgccttcagggcttcctgagacctgcagggtcttctcagccttggagtatcctcagacctgcagtcattgatgtgtgaacaggggccatgactggccttttcctaactttcccagtcaccctccaggattgggaaatgcctgtggcaaacggcagtgttgctttaaattactggaaggagaaaaattagctgaagatcattttgactcaaaccagacagcctgagccaggaggtgggaaggaaacacactgtggccactcaggcctgattagcccgaggggtcgacccagatgccagtgtatcctacctgcccagaatgcccacactctgatgcttgttgtttttcctttcagagatctgaaacctgaaaacatcctgttagatgattatggtaagtcttttcctactcggtagctgaggtgagcattgcaaccccaagaaagcaaagggcctcccagggattctcagagagggctggggaagctgaccacgggccccactcccactgctcagtgctgggtacctggggaagggggaaagctgtgagtgtgaacagagctccgcttggtgaacaggcagtgttcagagagactttgaaattcagagtttttgaaattccctttgaccataaggctctaagtgttaaaataacttctggccgggcgtggtctctacagtgcactgaacaaggagtccagaatttcagagatgctgggcaaatacttaacttccatcaagttctccacctctcatcttgtttgtaaaatggaaacaaagcgtcctgccctgccctgcccacccagaaggaagagggtggtggagaggcttctacatgacagcttgagagggaattgcttgtcagtctagccagctgtaaatgtctcaggcattacgtttgtgcattaccatcattattttctcttggctgtggacactgaataataagaacaaccacagtacccctcacagctgtttagcctcacacctggaaaatagttcctataccttctttttttttttttgagacagagtctcacttgctcaggctagagtgcaatggcgtgatctcggcctactgcaacctctgcctcccaggttcaagtgattctcctgcctcagcctcccaagtagctgggattacaggtgcacgccaccacacctggctagtttttgtatttttttttttttttgagatgtagttttactcttgttgcccaggctggagtgcagtggtgcaatctcaactcagtgcaacctctacctcccaagttcaagtgattctgctgcctcagcctcccaagtagctgagattacaggcacgtgccaccacgcccggctaatttttgtatctttggtagaaatggggttttgccatgttgaccaggctggtctcagactcctgacctcaagtgatctgccctccttggcctccctatgtgctgggattacaggcatgagccaccggtttccacacctttgatctgactagatcttcccacctgcacagagaagggcaaggcagcatctctgtgcccatttaacagatgacaaaactgagcctcaggggagccatcctgccaaagtcacccagcagcatcagtggggagctgagggcagaaactgggtctcctcccaccaggccccagaacctggcagcccccagtagagggaggggagaaaccgggtcgctgatgacctgaagagaggtctgcatgggatactgccctgtggaggggcggtcggagggcccaggcctgccgcccctctctggatgtgcccggtgcctcccttggtctaagaaccaagcccacgctgctcctctgctatcctgactgtcagcccccaccgagccagggagtccacacggctccagcctggcggggtctcgacactggcccttgctgacatctaggctggagggatgggggtggggccctggtgtccataggcagggaagggaaggggacgtgttccttcctgtggggtaagttgtggccgcgaccctgcccaggtgggctgtgggagggacaaagaccaaagtggagcctcagctcagcgtctcccgctctgggggctcagtcctgggctgtgagctgggattcatctccaggctctgccaggtcagaccagatgttttcccttctcgtttctctaaagtgaaaaacaaccaatctccagagaccaacaaggcaggccggggagctgcttcccaaatcgttttataattttttccccttaagcaaattgttgcataatgccagaagaacctcacatttttcccatgaagtaatcccagaaccaagccaagattctctgacctcagcgttccaggaagcccattcagcctttgactaggcaggtcggtcaacgtccagccgggtccaggcatcctattgcatctttatgttccactcctgaagagtgggcattttcctgtgtcctcccacacctgcactctcccaaggctcttgtggtcactctgagatggcagattggggtccctgttgtccttggacagatgagaatgccgagagctcgtatgccttgcccaagggcacacagcaaggccgggtgcccatgcggctgtcccagggacccactgaccctgctgtccccctcaggccacattaggatctcagacctgggcttggctgtgaagatccccgagggagacctgatccgcggccgggtgggcactgttggctacatgggtgagtgctgggctgcctgtgtcaatgcaccttgagacccaccacctgctcaccgccggccgagcccccagagcctgcccgcagagcctctcgcctcttcatgcactgctgatcacacacagagtcacagtctctgcagggctgctggggggcggccttagccagggggagggggagcacaggggccccagatgtgatgactgctctgagctctctgcactcccaggcccccagccccacctgtgtccaaagccaagccactcttaggggtcggggcctggcatacagcgctgctaggggaggccacattgaagcaggggtctgggaggagaggcctttgagaggaaggaggtaattcacaagagcccgcaaatgagaggcgcgcacagctgctgtgtcaccaagcatgattccagtagagagcagccttgggctcctgccacctttcctcagtctgctctgagaccagcgtcctgggggttgcagggaagagacccagagttaagtcctgtgccctagaatcccccgtccaattgggggcacgccctgggcttcctcctgtgcatttcacacacctaccctccttcccctgagaggcgcgtgcccggggagcaggcacgctgccgccctctagtcaggctggtactgacagcagctgcacaggaggtgtgccttgtctctggtgctagagggtccttttcagattgcatgacatttggcaacctgtggagtgtgtgtctgtgtgtatgtgagtgtgtgtgtgcccacatgaatgctgatcgatgattgataggtaggcgggtgggcgggtggatggatggttggatggatgatggatgatggatgggtggatgatagatctgcctacctgtgtgtgcatttgcctgggtctccttttgcagagtgttccatgcatctgtctgccccggctcttgtgtgcaaaccagcacatgtgtggatgcatttccctccagacatacgtgctgatgctgcagaactatcttttctgtatttctatggtaaatctgtaattcggtttatcaaagtggtacagaagacatagcaagagattgtttgaattacagataaatttaagatcatctttaatttgggtagatacacctttattcattgaaacaaatatactgatagcacctgttctgtgccaggtgtcatattgttacggtagtgaataaagtagctcatgttctaggcgaggggacatcaagagtgcaggacacctccatccacggtggtcagagttctaaagctacagtcaaagtccttcgggggcacagaggagagtcatcagggcaagctccctggagggggtggtattcacagcagttggtggggtaagagttggtggcggccatgaaactccaggccttctgtgagcagcgccaccagctgtctccctcctcctcactcctctctcctctcctctgcccccagctccagaggtcctgaacaaccagaggtacggcctgagccccgactactggggccttggctgcctcatctatgagatgatcgagggccagtcgccgttccgcggccgcaaggagaaggtgaagcgggaggaggtggaccgccgggtcctggagacggaggaggtgtactcccacaagttctccgaggaggccaagtccatctgcaagatggtgagctcctggtggccagatgccaccctcaagctggtggctcccctccctgggcctggccccagtctgtccccagaacagcaaacaggctgaagggacaggggtctgagcatgggggtgggggttgcagcccaccaagctagagttgagggcactccttgctgtggactggggtggtcagcggagacttccaggagaaagcctgggtggggcagggacacccaggaaccaagggaagaggggtgaggggaacagtgtggaacaccctcacatccagcctgtgggggggtccacacagggcggagaagagatggtctgagctggtgccccagacacaaagcaaccttgggccaagccccggcccctgcccgtgggcctcctgctccctccacctctggatcctaaggtgttggtttaagacgaagggctacagggggtgggggcgacgatttcagtctttgaacatcttataacaaagttttccaccactagatggactgctggtcacgccagcctggctcctgcatgacagggtctagggatagtgaggtcagacccacccaaaagctgggtgggtggggccagatggggggactggaagccagataaggagtgacaggagccattggaagtgggggatatgggagtggagtccgcccgtgcacccctgccactgggccgccccatgccggccctcaggcccttccctgggaaccaggactagtggctggctttgtggggagatggccacttcctgctgctgcctggctctcagcccccaagtccagcccatgcccccttggggccctcctccttatggtccccagcacagctgtgctggcacccccactgcaagcagctgccctctaatgccagcctcatagggacaggaggggccggagcacccagctccacaattgccagcccacagacttcctctcctctccctggagccacagatgtaccccgtatcccatgtacccggagccacagatgggcaaaccgagcctgggaggggggagccacacttcccacccctctacatctgcaggcacttttggggcagattcagcgtgtgcattgacaacccaggcaactcccggagtttaggaagcagcagtcctgggagttgattaaaagtcgcaatgcttctgctcaggaagacctgagatctgcgccgcaagcggccccaggagggtctggctcggctcctcaccccagaggcccctctcctgcagccagacacctctgcttggccccttcctgtcaccaacctcatcctcacatcacagagctgtgggaagaagtcctgtgtgtacagcagacccacactctaaccccacagctgttggcccgccatgcagctggggcctcagagaaagccacatggtcatcgcagccagggctagggtggggggaccggaggagcagtgcagcactggtcgggtaaatggaaatgtgggtgtgagccatacttggctgtctcattgggagatatctgtcaggtgcgacaaaacgagacaagggaaagaagaaggggtcagacagccgtgggcagagcatcaccaaatgtcccaggtcagggccaggcaatcagagaagcaggtcttgagagatctcagcagggatatgggacgtactaagaggatgacgaggcggagagggccccagtcccacccccagaccccagacacccaccttggcccctggctttggagctgggatctcctgctgcagcctggaccagggtgctgctgtccctctgctgccccctggtggacactgagagaaagcctgctgctcccggaggacctgtcccgtgggtacaaaaccactgtcctctggaagcctctggccttgctgcggcttcccttacaaatgatctttggtcttgggagtctagtcttaggcctccttcacgcccttgactgcagcatctccggcatctaggcctaccttgtcccctccagctggtggcagctcaggacactgcagagcctgacttgccaggagacctcgcaggtcctgggttcacagggctatttctaggctctggtggctccagccctgcctgcctaagagggtccctccacaatcagtgaggaagccagtctctggcccccaggtctgtcccccattctaccttagcagccgcagaacccactccccctcctctggagcccagaaattcacacatctcaccactttgtctcctgagcccagtccatgggcccagacctcagcctccatcttccccaaacccctgctcagtcccagcactgggccttagcccccctccagctccctcttgcctttcagccgtcttggtctcacttgtccttccagcccatctgtacccctcctccaggaagcccgctctgcctgccccacccatcccagctcacaccttctcttcctctcacttctcctggtgtccacctgatagcatgattgcaaactctttacctgacgatgtggctgcaaactgttgactggatgccagggtttcaaatggcagcatataggcgggtgttcaacctgcacacggtttttcaaaagaagtaaatggtaggttcattgccaagatttagaaatgaggagatttcatgtaataacctggattttctggcttctcttgaaaagcagaagccccaggccctggctgccgtcccacctggcaggagctgacacatagcccggcccggcccacccagcccacccctcgcctttctcatcctcgtttgtgccaccttcctggccagctgctgcagcccctgcagaaggagacttgcctctgagggactgcttagaacagtgcagcacctgggcccagcccaacccagtgccttgagcctttgttgaacagtgaagcccccagagagagaagcagaggcatgagtgccagaccctgagccgccagcctggtggtccgtgggggcgttaaggggcaacactgagcgactgagtgctctgctttgtcctttcaagggtggaacctggtgctggccctgatgccaccttcgattcctttgtttggggggcagccccctccagaccctgagccccaagaggccagtctggctgctcactctccccggcgtccccagccggtgcagtgcctgccccacaaggaccagcaggaagtgtacatgggatgaatatgagcaaagcgcacagggcattgggaaaagacaaggctgggcccctaccccaagcagtctgctcctctggattttagcctcaaagcagacacttagtagacaccaactgcgtacagctgcagcgctcagtaaggcagaggagaagagagaatcacgaggctggggcactgggagtgcaggtcaggggccggggccctgtggtcgtgtggctggccatggctagtcaaggccccctgcgcaggtctagccctctggcctcattcatagcctcatcccgtctcacctgggtgtctgctcccaaagactcttcctctcctagtaaccttcctgcctcgtggttctgatgaagacactctcctacctcaaccatccctggctccttctacctccagatgaaaatcccgccacctgacctggccttcaggatcctctatcatctctccctgaccagccccctccccttgacccatctctgcaccctcctcccgctttctaagtcaaacgtgttttgggtgttccccagactcaccctgcacgtcctgccactctgctttgctggtgcagttccctctacctgtatacccctccccctacccacaccttgaaagcctatttgtcctgcaagactcaacttaaatacctcttccccgtgcagctccctgacctccagctggcagccagtcatgccccctgcccccggggtgcccgatctgtatcaccttgatgcgtcctctgagcatgattagccccccatgagtctgagcactcctagaggccaagtgcctcggtggtgccttctctgtcaggaaggggcttgcacccaggaggtacaactctgcaaattagctgagtatgtgcacgagacagagctattgatgcagtccttgccttttgttgcttaccctacacagaagaggtgacagtgactcgacacccattaatgagtgcccaccataacccaggaacgaggtctgtaatcctgagagaaacaagattcctgctctcctgtcccatcaggcatctagccaggctgtgagtgtgtgagcacagatgcacgccaagactcagaggcagccctgaagcaagacctttgcagggtggggcagcgtgtcttgggttcctaggcatggtgcagacactgtggaggcaggaggtccggacaggaggagaggcccaggggacgtggcttcatggggctctctgtttcagctgctcacgaaagatgcgaagcagaggctgggctgccaggaggagggggctgcagaggtcaagagacaccccttcttcaggaacatgaacttcaagcgcttagaagccgggatgttggaccctcccttcgttccagacgtgagtagcctcccccagcccccagcagctcccttcacagggtacccagggctgcccccgagtgctgcctcacagtgagctggtgcagagtgtggggcacatcgtgtctttgtggggaccagggtcccctcccggccactcctcacctaagctgcagatgaacttcacgccaggcagtgcagaagaggcgtgggccagggagcccacattggctgtccagagacttgggcactttcccaggtctgggggtcctggacagattccttctaagcgtcagtttcctccctgtccagtgaaaccagtaacactcatgcctcccacctgcctgggagatttgagggtgaaatgagaactgaatggggaatgctttcaagagcattgacggccactacattcagttcatcttgaccagcatgcatgcatcgagcactactgttgacgccaggttctgggccaggcagaaacataagaggcccctcccccagcagctcacattgcagggagttgcatcttcccaggaggtccccaggtcccccagtcggtgtgtgaggcaagattccagctgaggtagaattgtccttgaaagtcccctacatggtctataaatcatgagctctcagctggatcagaggcccaagagatgcagaccaggcagaggctgggtgatctgtgcgggatacgtgctgtgattccggggcctgctctgtttaaagtcagggagtcagaagccaggaaggcctgctgtgcttcggctcctgccacgctcccgcggatgaccccttgctggcagggggactgggccggggactatggaggccgtgggagcagcagtgtgctgcaggcgaatgactgcatctccagagagctcatgtgcacctctcttcccaattccgtgtccaatggctttgcgtcggtagcttacagtagatctggtggtagcatctgcacagcagcaatttgcaaatgctacaaatcagggcctctgcgtccccctctcccagaaccagtggttatcacttaccagtaccgccctgagtggaggcaggtggggaccgtccttggaactctggcaccccctatacatggggattccctggtcctctgggacagaaggtggcttgggaagctgctaggtgcggatcagtgtccatggcaaccacaccacagaccccgtctggccagggatggcatcagtgtgatgggtaatcagggaatgctttttggagaaacacgggggccactgagaatataaagagtaggccgggcacggtggctcatgcctataatcccagcacttgggaaggctgaggcagtcgggttaggagttcgagaccagcctgaccaacgtggtgaaaccccatctctactaaaatacaaaattaaccaggcttgggggcacacacctataatcccagctacctgggaggctgaggcaggagaatcacttgaacccaggaggcagaggttgcagtgagctgagattgtaccactgcactccagcctgggcgacggagcgagactgcatctcaaaaaataaaaagtgaaagtcactgaatgctgcaaactcaatctgcagatgagcttgagcaggcagggggaggatggtaatcacagcattgctctcgaccctggctgcctggcgaaccgcctggggagcatgaacaacactcgccttggatgcagtccccagggagtctggggtaagactcgggcttcaggagttttgaaacctccccagctgattctagcgtagagccagggttgagagtcactattatgggaagtgccacatgcaaggagtgtgttgtttgttgtttgtttttagtgccaagggctttgggagtggccactccttggtgttccaggaaaccacatagtgttgagtgcatgaacatcacggttgtgccattgggctgatgtccgaaattggagaggatgtgggcatccagactgggggtgtggcaaaggtttggaacccgggtggccatccttgtggcctctgggctacctattgctatggtgacgggctgagattagtcatcgcattggagctattcctctaccttccagcacactccaggtcccgtgccaggccccaagggagatcccatggcacacaaaacagttggttgtttccagtctgaagaggagcaggggtgtcagcaaaaccccttaaatagaagtagaaatacgagtcacaagagaagagaacaggcagcctccgggaagatgggagagtagcggggcctccgtgcgtgcacccaggcatggctggagaaaagcgctccaggccctggaagcagcatgtggaaggaggcggctctgagggtcagagcgaccaactgtcctgctttgcctgggactgtcctgcttttagcactgaaagtcctgtgtcctggggagacagggacagttggtcaccctgggagtgaccctggccacttcgaatcagggcattaggaggatgaggtagcagagccccgcaaagcgcacagcctgacaaggtgcacagagcagcccaccggtgccctcctgcctcagccgtgtaccctgtggcccagggcctctgttcctggcatccgaggcctcaggtcagcaaaggttgcaggccctggagtgcgaagccgctgtgagctggggactttgccttttccccactggccctccccaggctgcacgccaacccccagtcatccctgccagccccccacagtcatcccgccccccacagtcttccctgccagccccccacagtcttccctgccagcccccccagtcgtccctgccagccccccacagtcatccctgccagccccccaccatcgtccctgccagccccccaccgtcgtccctgccagccccccacagtcatccatgccagccccccacagtcatcccatccccacaccactgtcggggctgctgccacattcctaaaccacgagcactgtgagtgacatcatctttttcacttccattgactctttttttaaaataaaaatcaatgtattttaaaaggaaacctttccaaggaaataatagccatgaaagaggggtttgggtgtgccaggtaactttctgttccattacagatttttaaaatacgctcatttcttaacattcctctgcaagccacccagggccagcttcgtgagcttgacctggcaccccctagggcaccctgggtccccacacctggctcagtgccctctgttgccatcttaaaattctaaatgtggaacatggaccctgcgttttcattctgcgctgagcatgtgaatgatgtggtcttgcttccagctaaaagtccgctgagttccacggtggcgtgcaccccgggctttgggaactagagaagggtcgcagctctgcaactggacacccctgcccgcacccctgcttccgtccacgtgcacttgggcccatggtttgctttgctggggacagcatggccttgagccttgagctggagaccagagcagactggaggggagagtcccagaaagtgccgagccctgagaccattgctagaaccttcctggcatggcggagcccatgctgagccggtgcactgattcacaaccttcgtattagccaaatgtcaggagactataagcaggaggtagcctctaccctccagtgacagatgtgtcaccaggtctggggatcccttcacaccccacctggggctgtctctataaaggcctcatctccagaggctctgggaagcctccccacaccaaccttgaactcttagagggcagggtccacccaggttcatctctgccctggcatagagcaggcccccagtgcacagctgagggacgagtaaggcaaaagatatgcctaccataataataccagctcccagttacgggcgccaggctcggtggccagcactgacagcagccccatcgcccaggtgcctcgttgtccccattttgccggtaaggaaacaggacataggcctcaggggatatgagacttccccaaagttcctaagccccacagctgggactctagcccacgtctgtccagtatgggtaagggagtgatggcaggaatgagccctgggctgggcacccaggtgccccgagctcctgtgtcaccccagccagggtccccgtcatggatctgagagagggctgcactgtcatctggaggggtcgcacaaaaaaaccacaggccatcatctgaggtggacaggaagcccagccaagccactggggccgacccctcccctggactcacctgcatctgagccacacaccctccagccactacccatagcagttctgggggtgtgtcctgggaagactcccttctgctccccaaaaccccaaggcctggctcggggccactggagccgcaggcgggacatatgtgtgaccggccctctgcccctggcagccccgcgctgtgtactgtaaggacgtgctggacatcgagcagttctccactgtgaagggcgtcaatctggaccacacagacgacgacttctactccaagttctccacgggctctgtgtccatcccatggcaaaacgaggtgagcagggcagaccacttgctttggtctgggtgggagggagggactgacgggtggaaggaggcgtcgggaatatgagtttggcggcaggaggctgagcgcatggtttctgttttctccatgaaggcagcacacaaaagctgtcagtggccaagtagggagctgtagccaccacgggccagtcattgacggggagcctcgcccagcccctgagacctggagggcgtgtggctcaggggcaggtgaggccagggg

SEQ ID NO: 23 - DNA, 5096 bp, Homo Sapiens
gaggccgaggcgggcggatcacctgaggttgggagttcgagaacagcctgaccaacatggagaagccccatctctacaaaaaatacaaaattagccaggtgtggtggtgcatgcctgtaatcccagctacttggcaggctgaggtagaagaagagcttgaacccgggaggcggaggttgcggtgagccgagatcgcgccattgaactccagcctgggcaacaacagtgaaactctgtctaaaaaaaaaaaatgcccataactgctattccacaagaaaggaaaaagccctcaaagagatacataaaaaggacattcatagacaaaagaaatctcatatttaggaggctactagactgattataaaacatacccggattccaaaagtatcagaacattaggagagaaaaaaaaaaaatcaggccaggcacggtggcttacgcttataatcccagcacttttggaggctgaggtagatggatcacctgaggtcaggagctcaagaccagcctggccaacatggtgaaatcctgtctgtattaaaaattagccgggcatggtggcaggcgcctgtaatcctagctactcaggaggctgaggcaggagaatcacttgaacccgggaggcagaggttgcagtgagccatgatcgtgccgctgcactccagcctgggcaacaagagcaaaactctgtctcaaaaaaaaaaaaaaaaaagaagaagaagaaaagaaaagaaaatcattgttaattcttatcacatcttgttaaacatacatcttgccatatcatctgccccagcctcaaggccactggcatctcctgaagcaatcaccaaatgttcccatcacccaagaatagagagctaatggtgacaactaacccatatagagcactgaaaggagccaggctctgtctgccctttcctgcatagtaaccttgtaacagcactacaaggtaggtactgttattatctccattttacaaataagaaaactggagcacaggctgggcgcggtggctcacgcctgtaatcccactactttgggaggcggaggtgggtgcatcacttgaggtcaggagttcaagaccagcctggtcaacatggggaaaccccatctctactaaaagcatgaaaaaattagcctggcgtggtggtatacatctgtaatcccagctacttcggaggctgaggcaggataatcgcttgaacccgaaaggttgaggttgcagttagctgagatagagcctctgcactcaggcctgggtgacagaatgagactctgtcaggaaggaaggtgacagaatgagactccgtcaggagggagggagggagggagagaaaagagggagggagactggagcacagagaagttaattgacttgtccaagaagggagggagggagggagagagggagaccggagcacagagaagtgacttgtccaggaaggaaggaaggaaggcaggaaggaaggaagggagggagggaaggaaggaagggagggagggagggagggaaaagagggaaggagactggagcacagagaagttaagtgacttgtccaagaaggaagggagggagggagactgaagcacagagaagtgacttgtccaggaaggaaggaaggcaggaaggaagggaggggcggagggagggaactggagcacagagaactgatttgtccaaggtcacccagcagaaggaagggaggaaggaagggaggaaggaagggagggagggagactggagcacagagaagttaagtgacttgtccaagacggacggacacggacggaaggaaggaacaaagaaggagggagggagggagggagggaactggagtacagataactgacttgtggaaggaaggacggaaggaaggagagagggaacgaaggaaggagagagggaaggaaggaaggaaggagagagagggaaggaaggaaggagagagggagagagggagggaagggagggaactggagcacagagaactgacttgtccaaggtcacccagccaggatttgagtccagaatgtgagtgcccttagccattacactgaattgcctcccagctgagaacttttaacaaatgtatcaggacatacacaactggatgctacaaggtggttttcggccaactttcccctttaaacacatgcatcaatttcaaactatttatatgataaaaaatgcttacacctttatcgatctcgtttttaaaatggtatggcttttcaggactatctttcacaatcgttaaagggaaattcgctttgttaatatgaaaaaaaaatcaaatatctgtttcatgagttgtcagtggccaacgctgtttagactacggcttgaacgcatcaccccttaaagatcatcttgtggccttgggcaaattgcttagccttctttgtttctccagcggcaaagtggatataacaatagtaccatctcctaaagtggtgaggattagctgatattatccatataaattgttatgcacagtacctgacacagagcgagtgcccaataaatgtctttcactatttaggtcctgggttctctcatttccagagtgcaagtcctccagcaaccacagaaacgctttctagagtcgctgcccactccttaaaaacatttgtccctacttcgcacagagcatagtgataccacaaacaggcttccctggaccccagccctgggggtggctatatcacctcgctcaggcccaggaagagagagccggctctggtctcccacccggcagcagcacaaaacttaaccaggatttctcacttcggtcaactcttgaatcaccgcgcccagtctggctggctcggcagcagatggaatgagggcgccggcgccaggaagtggcgctcacccacctgcccagcccgaggtgggcactcctccttcacagcatccccggggacctcgtccctccaccgcggaacgccccagaggaccgacttaatagtgccacagggtgggtttccccccaaatcctccaaaatacatcgccacgatttcgaaacgggagccgagggagacgcaccaagtgcttcccgacgccaggtgaagcgcaccatacctggtgtgcgtgttgagccccgaaccgaagtccgtgcggccgccacctctgcctccctgctgggggcctcagagagtgtgctccttgtccacgtgcgcgcagggcccgcagccgcccccacgccccagcggagctgcagcacgccccttccactcaccaggtgaagagtttgccttttatcctgcgcagcaggctggagaactcggccgccgctccctccgcgaggggctctggggcgccggggcccgctggcgagtctgcctccatcggcgcccttgcgcgtctccggcgcccaaaacccccgaagtgccgggtcccggaagacgggaggcggtgcctgtgcggccggctggggctccgctctggccctgcgctccctccctcgctctcttgctcgcgtccctctcgctcctccgctcggctccttcagcgaccaatcattaactgtcaagccctaagggccagacaatacatttgcagattacaacctggcacctccagggtggcaggaggagaaagggcaatttttttttcgtcttggcagccgagccttattgttgagcggcacccagtgtgccttcaggtttttagggttccttgtttgaaatcacaagatacagtgacacgaggttattgtaggtgattcctaagctaagaagcggtgagtgagcagtgagttagaagcagtgagtgagccgggactctcctaactggaaggactggctgacccctcctcttccctcccactctccctccctctggctgatttgtacaaaatcgcttcattaaaataactgaaggctggcagggcgcgttggctcacacctgtaatcccaacgctttgggaggccgagacgggtggatcacctgaggtcaggagttcgagaccagactgggaaatatggtgaaaccccgtctctactaaaaatacaaaaattagccgggcgtggtgacgggtgcctgtagtcccagctactcgagaggctgaggcaggagaatcgcttgaacccaggaggcggcggttgtgagccaagatcgcgcctttgcactccagcctgggcaacagagggagacgtcgtcttaaaaaaaaaaaaaaaaaaaaaaaaaacctgaaggcgcttcaggtctgtgtcgcttttccctgcaaaacatgggtaagatcctaaaaagatcttggaaacgtgcctttgtggcgtggatggaggcgtggctcattcctcgcggtgtgttggttttgtctttcagtattcagttgtctccgccgtgccagggagagagacggtgccaacccccggcgctcggcttggatgccctgccctggccacgccttccgaggcttccacgggctaaagagggattaagagacactaagctggggtcgaaaagttcctgtcactgaccccctgcttccggaaaggaggagatccagaaaacaaaagaaaaggtgttgggaccttttattttttcctggccacctgctttgggggttggggtgggtcaaaataaacgtaggttcaaatagacaggctgtgcagacgagctggcaattctgtaagaggagtctaagaaaaaaaacagctttcgaaaatgaaatattacttcaggaaccccaagtttagcagctgcaggaacctcaaaaaaacctttgaaactaagaacgtggtcatccgtagagactaattaagtattataatacaagcatattatgaaacaagaggacattagaagcacatttaagatgtcacttttgtaaagtaaacaactcatttaaccctgcatattgacaacgttgaattctacctgagccctgtgctcctggaaagtaatgacaattaagaaaccttcctaggccgggcgcggtggctgacgcctgtaatcccagtgctttgggagaccgaagcgggcggattactcctgaggtcaggagttcgagaccagcctgaccaacatggcgaaatcccgtctctactaaaactacaaaaattagcccggcgttttggtgtgtgc

SEQ ID NO: 24 - DNA, 3072 bp, Homo Sapiens
ttttaatttagcgggacggtctgtatttttatttgctaaatctggcaacttttggggttggggtttggggcccggcaacctttggggtgggaggtctttgtgtagagcccaacctgcccgccaaggcccactcaccggagaagaactggctgatggaggtgggcaggagcgtgaggaaggccaaggggtgggcgaaggagatggaaaggacagcggagatgtaggccacgccggccaccatggagtagaggcaggccagggaggtgtagaggcagaacaggacgaagttgcgcatgttcctgctgccgatgcagttgccggtgaagaaacagtgatggtcgtgcctcagggtgactctggcgcacactcggcagaagtgggtgctaggtgaggggcatggagtcttcctggccgaggccccctggcaggcccccaggtcgtctggggagttctggatgacaaggacgtaattgcccagggcgttggccgagaggaataggaagagcgccccgtggagcagggcgggcgagaagagccgggcggccgcggggtcctcgcgcatgctgggcaggaagaggaagagctgcagcacgaaggtcaccagggagatgcacaagaagtaggcgggggccaccacgttgagcagccgcagggccagcatcctcgattacattcctgcggggcccggggtgagaagaggactgactgactacggcgtccagggggcgccctcgcccgctcctccgtgccgcgcgtctggggcactgcacgcgactccacgcccccaaccccctgtcccgcggatttcccctccccagttccctaaccccggatcaggcaggccagagacccgagcccgcagcggcctcgggtctaggccccacctgggggtgagtgttgcctggggttttgagcgagctcggcgccttggcgcggcagagtctggcacaggagggagggactcgtttgcagtctttaggagttgtgagggtggggggcaccgggggataggactcctcccctctgtggatgtggaaacaagcccaggtttgggatttctggttcagacctccctaggaggagaaagggaaggatttggggtcgggggcaggagaatcagcggcacttgacctgctggaaatcctgcttcacactcccctttctccgtccctgcgtccccacccacacacacatcttgggcagcactcagggacctcaccaggttacccaaggctctttggaggtatgtgtgcgtgagggaccacgatgtgtgtgtgtgtgtccttgtctgtgactctgtacgtgtaatctgtgtgcgcttgagtatctgtatttgtgtatgtatatatctgcgtgtacagacacgcagcctctgctatctagctttaaaaaaatcaattgaaacaatcgatacactcacactcgctctcgggcaccgggtgaggtgggggcgcaaccagaatacctgtgtcagcgggtcctggccagcacatctctccaacgctggctgcccgggctatttctttgcgaagagcgttttcatttgaggcgaaattaaaatccccccttcgcgcccgcctcccgccctcctgctgagagaaacccaaacaaccctcatggcgccgaaatcctttccatgccgacaagcccgccctgggcgcacgagtggatgcttggccagcctttcctgggatcgaccccgccgccgtgctcagccctcaccacgtccccatcccaccccacgcctcacagccggggttcctggccagcttcggaagccaccgagaaataggattccgtgcgcccgagagaacttttccaggggctaaggaatcggccagccggaggcgcgagaaaagttctgggaaggcggttgcacctaggatgggtggatgccacggggcctccgtccaggctgtcccgtccgcacgggtcgactggtcaccttggaatcccctttgcaggtcccagcgccccccgggaacccgcagcctccgcggagagcgtgggcctctccctaccgctggggcgcagcgcagtgcacgcctgagggtggtcgccgggggctgggcacgcccccagtcctgcgccgccgggggctgcggcggtgctgcccaccccagagagccctcggcctggggctccggcgaagcaagtgccttcccggcgccggtcgccaggggggcgcgggagcagccagatgcgccgcagcgctgggaaggcggcgaaggacaggggctaggggagtgaggggcgctcggcaggcagcctcagccctggccctgcgcgggagaagggacagcagagaccgcccgtggggccccggggtgtagggagctgtccgttcagccctggcgcccgcctcgcccgcggcagagggcggcacagccggagccttggaaagaccggcagcgccggcagccgcgggcttctcggccactgcctcccggacgcacgggaagccgccccccgcgccgccgccgccgcactgccgccgtcgcagaggggtgaggaaatcaactcaccgagctctggtcgccgacaagaggagccccggacgccggctctcgccctgcccgaggctgcaaagttgtggactcggcccggctggctcgcagcctgcgcttcgcttcgggaactgggcaagtagcggggatgtggggaggagggagcgggcagctgctggcttcccacttgggcgccagcgagtaagggccaggaagcggcggggatggcagctgggcaccccccagccccgccacccctccctccgctcctgggggcggtgctctggccgccagtctcagcatcgtggacttgccccctcctcccctctcgattccccttgagcgggctggggcgccctgcctggtttcagcgcccgttccagctgggagattgggattcagccctgatgtggattctccagccatcatcctgcccttccctctcggctaggtcccacgaccttccctgctctccactcggactgaaggaaccctgggggcttgagaggtcagcttgccagggcaacacccatgaagatcagcgtcatctcctcggaagggctgt

SEQ ID NO: 25 - DNA, 3845 bp, Homo Sapiens
ccgcctcccacgttcaagcaattctcctgcctcagcctcccgagtagctaagattacaggcatgtgccatcacgcccagctaatttttctgttttttgtagagatgggtttcaccatgttggccaggatggtctcgatctcctgacctcgtgatctgcccacctcggcctcccaaagtgctgggaatacaggcgtaagccactgtgcccagcctacattttatttttcgattgactcccgtgatcagagtcaacttcccatgttattttatgtgaatatgtatcaatgaactattagaaattgcaatgtttttgtaggtcaaaacaattcaatattgacaattttatatgattcagcctaatacatcattttttccatcagccatattgcatgttattatttatatatacgtttatttagttagcctatctgttctctgtgaggaacattacacagtttctgagattttgttacgatagaagtcagcattgataagcctctgcgcacctgttttaatgtaggatcattgggaactgagcagtagcttacagggcttgggaggggatttaaccatttagtcaacctccactcacatcaccctcccttcttcgataatgggcaattgagaaagggcaaatgtgtgtaaaaactatgcagatgcagtttcaggattattttcttcttttctgcagtgtcttttcccaagctacatcagcgtctaaattttggagttactgatgcttccgttatttctgcagatagaatattatgtcgtaaataatgtttacttgtccattagtattatataaaagtgcctgtttctccccactccagctatcattgattattggtaaaaattttaatgtatccaattctaataggcaaagaaaggctctcctacttagatcttaggtgggggtctaagttcatatttttgttttacaaaaattgaatagccagtgtttttgagttgaatgatctatccattccgtataggagagtttaattatattgtgattttgggggagataattttcacaatttaccccctcaaaatgtagaaagtagaaaaagggtagaaaaatcgcaccaaatttgaacaatgtagcatgcttttagagttagggatattttcttttggaaggatttcaagtctggcgtatttgcattgattgtggttatggcgcatttaacttttccaaaccagcttttttgtaccgcacataggaagacctgagggtgagtgtaaattaggattgtttggccagtggtgtgtgcaaaaatttattgtagaaccaagaattatttctttagtattttacacattttaaaaaacaggtagacatgtccattgatcccaggttgcttatggtttctagaggccccctctcattgcaacagtgctgtggggccctaggggtccagtagccccctccccccaggtcattccggtgagggagggagctgggacccctgcactgcggcaaacaagcacgcctgcgcggccgcagaggcaggctggcgcgcatgctcaggcggggatgtgtgcgaagcctgccgctgctgcagcgagtctggcgcagagtggagcggccgccggagatgcctgacgcatctgtctgaggagcggtcagtgacgcgatggagcgggcaaggtcagctgtgccggtggcttctctcaagagacagcctggggagcggccacttttattcatcagatattccaagtttttaggacttggagtactgaataaacggaatttgggccctaaagtcctttgttctggagaaccagatccggaatgttcagaggcttgctgttgtgccgttctgccccgatggtatcctgtccgctcgcattggggcgcgtcccccatccgcccccaactgtggtgtcgcgacaggtcctattgcgggtgtctgcggtgggaagggcggtggtgactgggagcatgcggggtaaccgcagtgggcaagggacatgggtggaggtgggtacatcagggtgattgcagttccgtgtggcgagggtacgtggggggaccagtgcatagggattttaggcggaggtaggtatattggagtgattgtggcggggcgaaggtacgtgaagtgatcggtatttagggggtgttgagcgcaggtaggtgtataatagtgaccactgcgtggtggagcagggtacgtggggcgactggggggggaattcgtcgcagtgaccgaggcgaggaggctatggcagtggaccagggggatgagtcggtgtgacagtggtgggggttgtgttggtggtcgcggcgcggggagagtccgtaggaagtggctgggaggtagggggaaggcggcgacagtgggtattggcggcggtgggcattggcagcgggtaggcatggcggtggtggactttggcggcggtaggcatggcggcggtgggcatggcatggaggcggtgggcatggcggccgcggggcctgtcgctgtccggagtgactaagggacgctgaatgattgctgtgtagaggagggggcatcagaaggggcagtagcacagtccgcagcctttaattttcctgtgacctgcgatggtcatctggtttgcctactgtggtggtggtgcttttttattaaaactgcgcaatgcctacactgccgcaggggctgcagaaatgcgtggaatccttgcgtaccctttaggaaccctcgctttagaggctatggcataagaagactggaatgatgtgcagaacttgcatttacagatcttttgactgataggccaggtgatgcctgggggttacttttttttcattgtttctctctgttgggaaccaggtcttggaaggctatgtcgaaataacctgggggtctgtgttgcgtcactgccattgtgcagctccttcaagatggccgccgctgcagcggcttagatctgcgcaagcgcttcagcgggggggtggccgcttcctccctgtagagccgccagtggggagggggcaggtggtgtgtgttcagcttctgctgtttcggagtttcagccgtaccctctttagggtgcagtggtaaggagaggaagccggccaaggtgggcggctgccccctccccaaagtgctgcttgggaaaggatgcaggttgcgcagacgcagcagaggtgacagtcgcctccgcttgcagtggggcgagacgtggggcaggggagcgagggcttacgcagcttttgcctggaaggaatggcagccctccccttcacctggctgatacagcagctgttcctttccggttgtggcgcagtagaggggggaggagggagatgggttggcgcaggctccgcctagcaagcttggcagccaccccttacccacggtgcagcagtagaggactggaggggaatgtggctagaggccaggcatttgtaccacctccgcctgtgtgggatggcagctgcactgggctactgcttttcagctctgcagtaaactagagtggtggcggcctggaggccatcaaaggtgcagccaccccaagacctgctgtgctgtttcagcaagcctccattaatgatagagattttaaattggttttctgactccctggaaaatcgtaccttttcatttttgtagttcctctcttggttgtattgtgcgctaattctctattttcaaactggacttgttaaccccttttttttaactccctgtagtctttgatttccattcgacacatttaataaatgtcaccatttaagattcagttatccttcttaatctctggatagtccattctgatgcactgcatactttccttaaatgggttgggggagaggacatcgtgatggctcttcccgact

SEQ ID NO: 26 - DNA, 18463 bp, Homo Sapiens
tttgagtaggcgtgtatttcgcagacaggtttagcgccttctgcctgccaggcgccgagttggatggtaggaatacaccccaccgggcaagacctggtgcctagccttttaaggcatcagtcactgggctgaaagagagaaacaagccaaaaaacggaaaaactagttagaagtccagcacatgctttaaggaagccagcaggctgcagtgtgagagaattagcaaaagcgtatctgacttagacaggggtgttggaagcagctccccaaaagtggcgttgcccttgaaacgcagctcaggatttgcatctatgtgcaggaagccttacagcacgagaggttcatacagggacaaggcgccaagggggactgaggggcacgaggggactgagaccacccctggcctgcatcgctgctgtggctcgggtcctggtgacccaggagcagggagaacagagagctccgttcacatctgagacatcagagggagagatgttgtattagtccgtgttcatgctgctgataaagacatacctgagactgggcaacttaccaaagaaagaggtttaatggacttaaacagttccacctgtgggggaaggcctcacaatcatggcagaaggcaggaggagcaagtcaagtcttacatggatggcagcaggcaaagagagagggagcttgtgcagggaaactcccccttataaaactgtcagatcttgtgagactcattcactatcacgagaacggcatggaaaagatctgcccccatgattcaattacctcccaccaggtccctcttacagcacgtgggaattcaagatgagatgtgggtggggacgcagccaaaccgtatcagattctcaaaggtcagacccagcaggtgttgttacagcaaagagaattgccgggcacagtggcctgacatgggcgggagccctggtttgagctctggacacggaagggacttagaggaggctccggctgctcgttggtgctgaaggttgagacctggaaaggtgatggggggtgcaggcaaggcagaaaggaaacttctaggcccaggcagaagcatcatgctgcttacaccttcctgggaagtggcatccgcgggggtggccagcaagacctcctggctatgggacttttaagatgcatccttccatgctgttttcccagatatcctggctatcctgctgaccgacgtacttttgctgctacaagaaaaagatcagaaatacgtctttgcttctgtggtatgtatcctgtctcttcagacgaagggtcggctgggtgctgtggctcacgtctataatcccagcactttgggaggccgaggtgggcagatcacttgaggtcaagagttgaagtccagcctggccaacatggtgaaacctcacctctactaaaaatacaaaaattagccgggcatggtggcccatgtctgtagtcccagctactcaggaggctgaggcaggataatcacctgaacccaggaggtgaaggttgcagtgagctgagattgtgccactgctctccagcaagactgcgccactgctctcccgcctgggcaacagagcgagactctatctcaaaacaaaaaaacaaaacaaacaaacaaaaaacagacgaagggccctgcttgctgtgaccttgttgggaggttggctgaaactgcccatggaaggggcacctgtgagttttccaggcccacatagctgggattacaggcgcccgccaccacgcctggctaattttttgtatttttagtagagacggggtttcaccatgttggccaggctggtctccatcttctaacctcaagtgatcctcccgccttggcctcccaaagtgatgggattacagtcgtgcgccaccgtgcccagctgctggtgtgttcttaaccagtgtatttgtttgctgaggctgctgtaaacaaagtaccatggactgggtggtttagaccacataaatttattgtctcatgtttctgcaggctgaaagtccaagatgaaggtatcagcagggttggtttcttctgaggccccttggcttgtaggcagccatgtgctcatctgttctctgtgtcctcgagtggccatccctctgtgtgtgcctctgtgctaatctcctcttgttagaaggatgccagtcagattggatttgggcccgcccatatgatctcattttgccataatcacctctctttttttttttttttttttttttttttgagacagtctcactctgtcgcccaggctggagtgtgcaatgacacaatctcgactcactgcaacctccacctcccgagttcaagtgattctcctgcctcagcctcctgagtagctgggattacaggcacctgccgccacacccggctactttttgtatttttagtagagatggggtttcaccatgttggccaggctggtcttgaactcctgaccttaagtgatctgcctgcctcagcctcccaaagtgctgggattacaggagtgagccaccacacccgcacattaatcacctctttaaaggccccatctccaaagacagccacattctgaggtgctagggctcaggacttcatatgaatttgtggggaacacagtgtagcccactctagccagttaaaatgtgcattttgctggtctgtggaagcattgtctcttgaaggatgcgtgacagactagaaataccggtggctctgggtggcctgaggcacaagacagagatgggtttatctgttgttatatactacataccgttgtatcttttgagctttctcgtgtgtatgtgcattgccgactatttaaaaaaaaatttttaagctgatgaaattgacacattatcgggatactaaggggcaagatggctcactcctgtcatctcagcactttgggaggccgagataggaggatcacttgagcctaggacttcaagaccagcctgggcaacatagtgagatcccatctctacaaaaaatacaaaaattagctgggcctggcggcacgtgcctataatcccagctactcaggaggctgaggtgggaggatcacttgagcccaggaggtcaaggctgcagggaacaatgattgcaccactgcactacagcctgggtgacagagcaagacctggcctccaagatagtttaaaaaaaaaaaaaaaaaaaaaaaggtttctaggatttcactgcaatagtatcttttttcccccagatggcaaaatatttccgctttgaattgtttgaaaagaaatgaggagcgtgacccccactcttagttcccctcaccaggcccttgacctccctgctgtttgggtgctgtggggtaaagggtgacctccccaatgccctctactcatgcaggactcaaagccacccgtcatctcgttacaaaagctcatcgtgagggaagtggccaacgaggagaaagcgatgtttctgatcagcgcctccttgcaagggccggagatgtatgaaatctacacgagctccaaagaggacaggaacgcctggatggcccacatccaaagggctgtggagaggtgaggagggcctgggggtctccccacccactgtgttccttccgctgattggtccacccttggcttcgaccgttggccatcagctgtgaccttgaactccctcatcccagcttgggacccatgacgccattccagctccttctgatgactcaacctgttggacgttgaggccaacgggcccagaaaggcagctgtaacctgggcctttctgcatgcgtgggccactgcacctgccatggcgggctctctgcattctagggccagatttgttggagcagggcatggcatcttgtccttcctccttgggccgagcacccctcagggcccagaaccagctggcttcccctccctctctttattttttatttttttgagacagagtcttgctctgtcacccaggctggagtgcagtgatgcaatctcggctcactgcagcctccgcctcccaggttcaaacgattctgctgcctcagcctccccgagtagctgggattacaggcgtgagccactgcgcccagcctattttgttttgttttgttttgttttttagagtctggctcttgctctatcacccaggctggagtgcgctggcacaatcatagcttattgcaacccaaactcctgggctcaagccatcctaccccctcggcctcccaagtagcttgaactacaggcatacaccaccacacccagctagattttttatttttgtagagatggggcctcactgtgttgcccaggctggtcttgaactcctggcctcaagccatcctcctgtcttggcctcccaaagtgttgggattacaggcgtgagccaccatgcctgtccactccctctcttgattcccggaggcttcctggtgccttaatctggttcagactcccccatccacagtagctgtagctctacggggcttgcagccacccacctgcacctggcaggtcctctgcaagcccgctgtcccctggactcctcctctaagtcacaggcaggcatgtaaagcctcttcctggttatgccctggcgctttggggcgggatgaatgtcagtggctctctctcttcccctcctcgtcctcctgcaccacgaacaagctaaatcactcccaaagtcagagacggtcgtggcggctggttctgcagaaccagcgtctgtgccgaggctggcctgcctgggaagcacagttacccacccgactcctctccctgcagctgccctgacgaggaggaggggcccttcagcctgcccgaagaggaaaggaaggtggtcgaggcccgcgccacgagactccgggactttcaaggtgagcgggagacagcgtctgggcacaccccttgtgtggtgagccctgggccctccatcaggactggccacagagggtgaactgccccccaggtgacccggtgttttcccgtgggctgtgccatgtcctgcagctctgtgaagcattagaacgggctgtgccatgacatagcgatctccagaggtcacttagccctttgggggtatgtgggagagggagggaggagagcccagaggacctgagccccttccagagccgaccacacagccacacacgccaccaccaccccatcctcgtgcagccaggagctcaacagggcatcccagtcccatacgaaggaatagcacagggtccccacagcctccttccagagcttcctcctccctgtttaattacacgattgagatgtaattcacacaccacagcactcaccctcccaagcgtggggttcaggggcatttcagtgcatttccaattatgcagccagaatcatgttaactttagaacatcccaccaccccagaaagaagccccgtcccccttaacagtcactccccaccccatgccccaaccctggcaacaggaatctacttcctgtccctgtagattggcctgccctggacattccacataaatggagtcacaccgcgcggccttttgggtctggctcctctcgaggtgtggtattaaggttcgcccgcgctcagtgagcactttgtcaagaacaattcctggtgccctgtagcctgcggcaagctcccttcttccctttcactgtctgtatttttttttattttatcttcttttttttttttaaacagagcctcgctctgtcaccaggctggaatgcagtggcgtgatctcggcttactgcaagctctgcctatcaggtccaagagattctcctccctcagcctcccgagtagctgggactataggcacccgccaccacgccccactaatttttgtgtttttagtagagatggggtttcaccatgttggccaggatggtctcaatctctcgacctcgtgatctgcctgcctcggcctcccaaagtgctgggattacaggcgtgagccaccgctcccggccctgtattattcatttctaaattggataatactcaaacaataagtggcctggtatggtggctcatgcctgtaatccctgcactttgggaggctgaggcagatggatcactggaagccaggagtttgagaccagcctggacaacatggcaaaaccctgtctctacaaaaaatttaaaaattaggctgggtgcggtggctcacgcctgtaatcccagcactttgggaggccaaagcaggtggatcatttgagatcaggagtttgagaccagcctggccaagatggcaaaaccccgtttctactaaaaatacaaaaaattagccaggcatggtggtgcgtgcctatagtcccagctactcgggaggctgaggcaggagaatcgcttgaacccgggaggtggaggttgcagtgagccgagattgtgccactgcactccagcctgggcgacagagcgagactccttctcaaaagaagaaggaaggaaagaaagaaagggaggatggaaaattcagttttctaaggctctaagttggtcccagactaataaatgggcctgatacaatcctcactcacaccctactgtgtttgattttattttatttcttttagagacaggatcttgctttgttggccaggctggagtacagtactgcagtcatagctcactgcagccttgaactcctgggctcaagcgatcctcctgcctcatttcccaggcatgcaccaccacaaccagctaattttttatttgtagagacagagtctcattatgttgtccaggctggtctcgaactccaggccgcaagagtcctcctaccttggcttccctaagtactgggatcgcaggcctgagccaccacagctaacctgatttttataacaagggggaaaataatcagaggacaaggccatgccctcccctacctcccaggaatgcaggacacaagggggcagcctacctcagggcagggccagcggggttcctcatccttaggccagtccccggggctcagatgattccagggaaggccgacccggctgactgccacctccaccatcactctgcagagcggttgagcatgaaagaccagctgatcgcacagagcctcctagagaaacagcagatctacctggagatggccgagatgggcggcctcgaagacctgccccagccccgaggcctattccgtggaggggacccatccgagaccctgcagggggagctaattctcaagtcggccatgagcgagagtaagttggctgcccacacctcaagggtgcagtcttgccggggtgggctcctcagggaaccccaggccaggctcacggctcattgtggccgacacggcaccctgtccaggacaggcttctatgtggggggggcccaggagcagcactgaccgccccccggtgcctgtgagagccagaagggccttagacataatctgggccaagccgctccttgcagacataaagcactttctccccgttcaacaaccgctctgatgctccctgcatgcagaggctctaagccgggccgtggggaggatctgaagttgactaagactggttccctacctaccagaggttcctcttcttcctgggaggtgggtcctggtgatatccccagaaaaacacacgcacactccctcagtgggtccccacgcacagctctaacacagccgccaggcccctgggctggccgcttgagcaggcagtcagcgcccagtctgctctttctttttttcttttcttttttttttttttttttgagatggagtctcgctttgtcacccaggctggagtgcagtggcgtgatctcggctcactgcaacctccacctcctgggtttaagtaattctgcctcagcctcctgggtagctgggattacaggcacccaccaccacgcccagctaatttttgtatttttcgtagagatggggtttcaccatgttggccaggctggtctcgaactcctgacctcagatgatccaccctcctctgcctcccaaggtgctgggattataggcgtgagccaccgcgccctgcctcaatctgctctttcaacagtgagggaagccgactcagcccctgccttccagagcctttccgcagaataagacggcagagacgggggtcagtctttctccctccaggcccactgacatccttccacccggctccagtggccattgttcttggccccctggggacactctcatatcccgcaccttggcctggaatgttcttgtccccacctctgtgcctggccacagcctgttggtcctagagggctttctgtagacagcccttccccacaaagtcactctcccatatggccattgtcacacaatcagtgtatggtcattgtcatataacacaccaagtgtttcctgctggccctgggcagggccacatccagcattcgccagcccctggcccagggcggcctggtggaaggagctgcaggagcctgtacccgccctccccatggctgccccacagccctgtcctctcacttagacgcagattggcctgtcctggtggccatacctgaagtaagggtgtgcgcagggacagtggggctgaaatcccacggcacacagaagggggcaggcgatcaccaccccagtgagtccctccgtccacccgggtctcgctgccccagcgctccgtattcccccagcacacttccgcagggcgacccgtgcctcctgtccccttccttccacagtcgagggcatccagagcctgatctgcaggcagctgggcagcgccaacggccaggcggaagacggaggcagctccacaggcccgcccaggagggctgagaccttcgcgggctacgactgcacaaacagccccaccaagagtaagagcggggccgtctcccctcctgcctccagggccgcccctcaggatgcacattaacttgtatggggtttcctagaactttcttttttgttgttgttgagacagagtcttgctctgtcacccaggctggagtgcagtggcgcaatctcagctctctgcaacctctgcctcctgggttcaagtgattctcccgcctcagcctaccaagtagctgggactataagcacacgccaccatgcccggctactttttgtatttttagtagaaatggggtttcaccatgttggccaggctggtctcgaactcctgacttcaggtgatccgcccgcctcagcctcccaaagtgctgagattgcaggtgtgagccaccgcacccagccgattttctggaaccttctgaaaccctccagacatcgttggttgtgttgtgacagcagcacccagaccagcctgcccctctccagcaggcgtctgtgctgcagacgccaccattcgggcctagcctgggtttcctacctgggcaggggctgggggtggactgggaagcttccccctccccacgggatggcagcatcctcatgcccctggcttggggttctcagatggcagtttcaagaagaaagtcagcagcactgaccccaggccccgagactggcgaggccccccaaacagcccggacttgaagctcagtgacagtgacattcctgggagctctgaggaatcgccgcaggtggtacgtggatatccatttgctcggtacagtctgagtcgtcataaggattcatgtgtgtgagcagcttctgctggggttgtccagttttagtcttattagcatcgacaagcattgtttgttttgtggtgaataacagtatctcagcccagattaatgcactggcaggtgatttcttcctgcagcctcctgggaaaagcaaagaggtccccaagaggaaggctggggaggggacaggctcagggcactcaccatggcttcatcaacaggcgaggaaccccctacagggaccaccagctttcagccggggcaggtgtggtggtgcctaccagatgccagatgtccccggctattcctttgcctttgaatcagaaggccaggtgcctactcggccctgcccaggtcagggggtcagaggccaaggccagttgcctctgatcagttctgaggcttggacttgcccctgtggccagagctggcacgcaggcctcatagccaagcccactctacctcccaggaggccccagcccctcgttttccaaacacccagatttgtacaagtcagctgaccagcagggcctgtgttcccagtcatgacccggtcctgggtccttcctgttatccacactaagggatgtattttcaataataagcaggggccgggtgcagtgcctcacacccataatcccagtgttttgggagaccgaggtgggaggatcactttttttttttttttttggagacaaggtctcactctgtcacccaggcttgagggcagtggcgtgatcacagctcacacagcctctaactcctaggctcaagcaatcctcccacctcagcctcccaagtagctgaaactacaggtgcgcgcccccacacctgactaattttttaaatgtttggtagatacagggtctcactatgttgcccaggctggtttccaactcctgggctcaagcaatcctcctgcctgggcctcccaaagtgttgggattataggcaaggccgccatacctggccttgggaggatcacttgaggccatgagtttgagaccagcctgggcaacatagcaagaccacatgtcgacaaaatatttttaaaatagctgatcctttggctgggtgcggtggctcatgcctgtaatcccagcacttcaggaggccgactcgggtgatcacttgagtccagggtttgagaccagcctggccaacatggtgaaaccctgtctctactaaaaatataaaaattagctggacgtggtggtggatacctgtaatcccagctactcaggaggctaaggtgggagaatcgcttgaacctaggaggtggaggttgcagtgagccgagattgcaccactgcactctagcctgggcgaccaagcaagactttgtttcaaaaaagttaaaaatagctgctgggtgtggtggctcacgcctgtaatcccagcactttgggaagccaaggcaggtggatcacctgaggtcaggaattcgagaccagcctgaccaacatggtgaaaccccgcctctaccaaatatacaaaattagccaggcgtggtggcacattcgagtaatcccagctatttgggaggctgaggcaggagaatcacttgaaccaggaaggtggtggtttcagtgagctgagatcgtgccattgcactccagcctgggcaacgagcaaaactccatctcaaaaaaaaaaaaaaaaaaaattaaaaatagctgatcctggtggtgcacacctgtagtcccagctactcaggaggccgaggtgggaggatcaggccactacactctagagcaaggccctgtctcaaaaaaaaaaaaaagaagccaggcatggtggctcatgcctgtaatcccagcactttgggaggccgaggcgggcggatcacctgaggtcaggagtttgcaaccagcctggccaacatggtgaaactccgtttctactaaaaatacacaaaattagccaggcgtggaggcttgagcctataatcccaattactcgggaggttgaggcaggagaattgcttgaacccgggagctggagggtgcagtgagccaagatcgcgccactgcactccagcttgggcaacaagagcagaattccgtctcaaaaaaaaaaaaaaaaaaaaaagttaaaaaaaaagaagaagaagaagaaggcttgagtctagtcggatgggtcttgagccactctctctggtttgacggtgtcctcttcccaggtggaggcgccaggcacggaatccgatccccgtctgcccaccgtcctggagtcggaggtaggcgcccgcgggtctccatctccccagggccttgtgcacgcgcgtgtggcctcagcccgataactagcatcaatctccctctcctctccgcagcttgtccagcggatccagacactgtcccagctgctcctgaaccttcaggtacaggggcggggtggggccggccacgcgtgccctttcctggttggctggggcgcaggtgcggctctcactcgcctggccctggccctccgcaggcggtaatcgcccaccaggacagctatgtggagacgcagcgggctgccatccaggagcgggagaagcagttccggctgcagtcgacgcgtgggaacctgctgctggagcaggagcggcaacgcaacttcgagaagcagcgggaggagcgcgcggccctggagaagctgcagagccagctgcggcacgagcagcagcgctgggagcgcgagcgccagtggcagcaccaggagctggagcgtgcgggcgcgcggctgcaggagcgcgagggcgaggcgcggcagctacgcgagcggctggagcaggagcgggccgagctggagcgccagcgccaggcctaccagcacgacctggagcggctgcgcgaggcccagcgtgccgtggagcgcgagcgggagcgcctggagctgctgcgccgcctcaagaagcagaacaccgcgccaggcgcgctgccgcccgacacactggccgaggtgagcgcgcagcagccagtgtgcgcaggttgggggtgaccggtttgcacgtgcatttgcacgagtgcatgcaggtgacagggttcgcgggtgcatgcgtgcaggagtgtaagagcaaacggcacaagatacccttgcattaacagctcatgccgcagtacagacctttctcggagctggctaaatgcttaacagaacgctgttgctcaaaacatgccataaatgttagaaacttcttaaaaaaaaaatgcactcctgtaatcccagcactttgggtggtggaggcaggcggattgcttgagggcaggagttccaggccagcctgggtaacatggcgaaactccatctctacaaaaaaatacaaaaatgagctaggcatggtggcatgcacctgtggtccccgctacttggaatgctgaggtgggaggatcacttgagcccgggagaatgaggctgccatgagccgtgatcacgccactgcactccagcctgggcaacagagtgagacatgagccgtgatcatgccactgcactccagcctgggcaacagagtgagaccccgtctcaaaaaaaaaaaaaaaatgaagctgggtgccatggtgtgcaccctagctactcgggaggctgaggccggaggattgcttgaggctaggtatttgagaccagcctgggccacgtagtgagacctcatctctaaaaaaaaaatgcaaaaattagcagggcgtggtggcacatacctgtaatccaaactacttgggaggctgaggcagggggatcatttgagcccaagaggctcaagagctatgattgtgccactgcattctagcctgggtgacagagcaagaccgtgtctctgaaaacaaatctataaaccatgggttctgtgaacagatgtggacacggatgtgtgagatgtttgtatatgagtgtgtgacagtatgggtgccactgagtgtcaccacaagtctgcacatttagcaggggttggggacgggcaatgaccagcagctccttcaggctgcacctggctctgtccagaacaggagaggtcgagggtctcctgtgcacgaccctcgggggctctccagaggccgcacagcaggaacctcacattggatgtatctgctgttgtcccctcaggcccagcccccaagccaccctcccagcttcaacggggaagggctggagggccctcgtgtgagcatgctgccatccggcgtggggccagagtacgcagagcgccccgaggtggctcgccgggacagcgcccccaccgagaaccggctggccaagagcgatgtgcccatccagctgctcagcgccaccaaccagttccagaggcaggcggccgtgcagcagcagatccccaccaagctggcggcctccaccaagggtggcaaggacaagggcggcaagagcaggggctctcagcgctgggagagctcaggtgagccggccccaccccttcgcctgggcctggaaggtgcaactggtcaggctctagcggctcgctgggagccaggaaattcgggacacctgtgccatcctctggagaggaaaaccagaaggcacagctggcatcgtggctgaggccaccccacacagggccgtgtttggtctccaggcccaaaactgagatgatccaccctgcatcttctccacctcaaccctcaaaacagtgggatggggaccaggagccttagaaagggacacgggcaagaaggcagagatccctggccacgtgggatcagcacagccgggacagggacaggtgcaggcgcctctgctcattgtcccagttccacagagccgttccacagagtgggacacggagcccagagcagccccagtgtttccacggaggatgtccaggagctcctctgggggacacctccctgggggacaaccagggatgttctgggatgttctctgaagattaagggtgtgtcccgtggtcactagggcctgtgctatttccacaggaggctcagcctcctctccagatgccgggtgactctgcaggtccttccgcagggaggttggggccgttctccctgaatctggggcttagcatctgagcagctcaggtcacgggatccaggccgcccgtgggaagtgtcaggtgggggtggccaggcccctctgctctcggaggctgccctggcgggtggggacagctggccagcctggagctggcccaaataccttctctcttccagcgtccttcgacctgaagcagcagctgctgctcaacaagctcatggggaaagatgagagcacctcacggaaccgccgctcgctgagccctatcctgcccggcagacacagtcctgcgcccccaccaggtgagcccccaccccctgacatgagcccagtcccagggcagcggggctgcggcaccacccggcgactgctcagtctgaaccctctctctgttccagaccctggcttccccgccccgagcccaccgccagctgacagcccctccgagggcttctctctcaaggccgggggcacagccctcctgcccgggcccccagctccctcgccactgccggccacaccactcagcgccaaggaggacgccagcaaagaagacgtcatcttcttctaaaagggccgtgactcaaggtgcaaggcccctccctgccctgcccacccttcctgctctctggggacccccatggggtcaccatgcccacccagctgtcccctcctcttccctagcaaaccactgatgaccgcctggcaggggccagcctgtcggtgctctgggccttgcagctgtttctgtagggttagcggtggtgccggggtcactttctgaatctctttttttttttttcaaaaaggaaagtttttaatggaaagttgagccagaactaaaccagggagctgtctgaaatcatagcaccccatccgggtggcggggagatcaactccgagctgtttttccgaggcagtgaggaacggtgccggctctgcacggagctgaggacaggacagaccttgctttgagaaggagctgccggccggggccacgctccacagccgccgcgcgacagtggagccaagggttagggcaccaggaggggccaggtggcgtcggcagcatctgtccccagaatcaggcagaatccacttcccaaacagagccccacgcaggttcaccatgaacctcagggtcagggaatgagccaggcacgggggcatgggcagagagggccacggggcagggcccactgagggaacatcagtggccctccagtcaggttctgtgggtttggaagcccatcgtgaaaggggctgacctttgcccctttttacttggcattggttttgaaaccagctgtttcccaaactctgcttcccaagggcaaccgttgctgttcacacgctcagcctgtctgggggagcgggcctctagcttcagccagggcgggtacacaccctgggcacagggtcctcagcccccgggaaatgagctcccagggctggcgtcccaccttccaggtgggggctggcacatcacagactgtcgagagcgccatgtcccagggcatgcagaggatgcacctagagacgttgcagcaagtggacaagtggccgctgtgcgggcccctcgcttgtagtgagctgttgcagcttacggtccgttccctggaggggtggaggaaggaggtgttgggcagcatcaaaggtgctgggacatcccagggtggtgagatccatccacgatccagctccggtggagaaagggcccatgtcaagccttgttctgcaccccaagcattggtggtaggactgggtcctggctgatcgtccttgttcccagtggggtacatgtgagcccctgccagggccaagtccttctcccgaacccagggtcctgggaactgcagatcccggggggattcagcccttctcccactgtgctggcagaggcactcctgtgacgctgaatacagtgaacagggacattcccgccactcggggacagatgggcacaagggaggggaaactccatcaggaagtgctcccctgggcagaggcgcccactgggtgctgtgggctcaggagggggcggggcaggagctggtgccaaccgggaaccagagccccacagccatacagcccattggtgacaaggtcctgagaacacagtggccaggtgtccccaggctcctggcccctccgacgacctcaactctgcccagcccggtccctggccatcagcgacgctgtccgccccccgtcagatcccatgtgtgccatgtttatcatcagtgttttgtatttttgtactgagtatcggagcactttacagaagctgactgtacattcctgttctgttgtgaagagaacattcccagaccctggcaccctcctgagccggcgtgtgccggtccagccctccgagatgccacaattccttggatgggggagaagttcaaggaatttctgctcggccacgcggtgggaaccccgcgtccccgccatgtggcagaggggtctcagtcgtgctaggcatcgggcggcagcgccgacagcccttccctcgccagtgcccctcggccactcctgggttggagcccgattttatttgtaaagttgacagtcgagcaaatgttcctattttcgtgggatctgcacacgtctttgtcagttgtggtcatgatcttagtcacctgctaattatttttacaatgattacaacatttcctcactgcgggatatttctgacccgctttagaacttaagacctgattctagcaataaacgtgtccgagatgagcggtgactggcgtgcacgttcttggaggttttatttgaggattttcttctgcccaaacgttgctgcaggagtagcaggttctgttgggggctccccatggctcctgcccctcagctcgctcacctgccctccgtgtcctgcttaacgctctgaagaccccttcaggtccagtccccaggagttgttgggggttttgtttttgtttttgtttctgtttttttggtttgtttgtttttttgagacagagtcttgctctgtcgcccaggctggagaccagtggcaggttctcagctcactgcaacctctgcctcccgggttcaagcacttctcctgcctcagcctcctgagtagctgggattacaggtgtgcaccaccacgcccagctaatttttgtatttttttagtagacatggggtttcgccatgttggcgaggctggtctcgaactcctgacctcaagtgatctgcccgcctcagcctcccaaagtgctgggattacgggcacagggcaggagtggggcgtggaggtgcctgtggagggtcctgcccaccgggtacacttcaggctttggtggcgcctccacgaaaatctttttgcttttaatccacaataaccgcaaaggctggaactttcacttcctccatctggggtgagaggcagcttggccatgagtatgaaatcatcatttccacctggtctgagtcccggtccagtgaggcgaggaccctgctgtttcaacagagggtttcccatcacaaggggactaggtgtaaagtcgatcactagctcactaggaagcgcaaaaagggaactctcaggcagcactgtccaccaggaagatgatgcaggccacgtgtggaatttttcatttttagtagccatattaaaaaagtaaaaggagggccgggcacagtggctcatccctgtaatcccagcattttggggaggcgggggctgaggcaggaggatagcttgagcccaggagttcaagaccagcctgggcaacatagtgaaaccccttcacagaaaaattaaaaaattagccaggttggccgggcgcagtggctcacgcgtgtaatcccagcactttgggaagccaaggtgggcagattacgaggtcaggagatcgagacc

SEQ ID NO: 27 - DNA, 15597 bp, Homo Sapiens
ttttgtcgctggcaaccccctctcgaaagcgtaaacgctcccagggagccaccaggaacagatgtggatgggcagctcccacccagggcacagctgtcattcactcggctcagaactgggaagccggccgggcacagtggctcacgcctgtaatcccagcactttgggaggccgaggcgggcaggtcacctaaggtcaggagttcaagaccagcctgacgaacatggtgaaacctcatctctactaaaaatacaaaaaattagccaggcatggtggtggacacctgtaatcccagctactcaggaggctaaggcaggagaatcacttgaacccaggaggcagaggttgcagcgagccgagattgcgcctttgcgctccagcctggcaacagagggagactccttctcaaaacaacaaaacaaaaacgaactgtgacgcccatctaagcaggaggcactccccatgcaaaggcatagcgtgttctctggaacaggcgcctgggagaaccgatccactcacctgttgtgcagccttgtcggcgagcagcgcgaattccacagacaggcctttcagagcctgcttcagggacccccacgtgctgctattcagagcggcccaggagggcagcggggtcgtgtcagaccctattgcactgagggagcaagcacacaggagaggagacactcaaggcctggagctcacctggcagtcgagtctggcatcccccccgacagatgtcctccacggcaacctgcgtgaccccgtcctaggaccctgctgctcaaagagtggcctgtggggaccctgggagcccgggagaaagggtggccctggggctgcacctcaggacctgctgcgtctcttcttcccaaccagcccccaggtgacatgtgtgcacaggtgacgggcactgctggggcaagcagagtcccgggtggggtctcccctcccctcaggcaaaggaagcgctgccagcccatggtctgttcttccccaagtcaaagggatcttttttttttttgagacggagtctcgctgtatcacccaggctggagtgcagtggcgcgatctcggctcactgcaacctccgcctcctaggttcaagcaattctctgcctcagcctcccgagtagctgagatgacaggcacccgccaccacgcccagagaacttttttttgtatttttagtagagacgggtttcaccatcttggccaggctgatcttgaactcctgacctcgtgatccacccacctcggcctcccaaagtgctgggattacaggtgtgagccaccacgcctggcctgggatctttttttaaagtctcatcctgacagtgaaaaaactaccagactagaaactggtgagcatttactcgtgctcagaaatccgtgtttcagggccgaaattctcccgtgtttcttccaaatatgaccccccatgtgcctgagccactttctgccccttctgagatgaaacaggtcaggatgctggttattacggtaaacgcactttccgcccaagcccttcaccagcatggattcccgtcccaccgcgcgtgcccctgcagaagctgaaaggtcacctaccttagctccttcccgaatatgagaagatctgccgcattgtcgatggcccgcgatgcgatccgctcggccctgtcgcgaagcttgtgaaagctattgtagatgttccggatcagctcccggctgatggcaaactgagcctggatgtcagctgggaggaagtcctgacatcatgatggggggagagacactgtgttagtcgctggggagcacctgtcagacggcagcagccggtcccccagaagctgagccacgggagacacagcaggtccatgagccaccccgggagccccactcctccaggcctgcagggatcactctgtgtgtccaaaaaagaaacaaaaaccatcatcacctgcatgccacaaacacaaagacaaatgatcccatgggatgaggaccacagagtccactgaaatctcatcacactggaggacctatccaaaaacactcaaataaggccaggggcagtcactcacacctgtaatcccagcactttggaggctgaggcaggtggatcacctcaggtcaggagttcaagaccagcctgaccaatatggtgaaaccccatctccactaaaaatacaaaaattagctgggcatggcggcatgcacctgtaatcccagctactccagaggctgagacaggagaattgcttgaatccgggaggcagaggttgcagtgagctgagatcgcgcaaccacactccagtttgggcgacagaacgagactctgtctcaaaacaaacaaaccaacaaaacactcgaataataatcttgccgggcgcagtggctcacgcctgtaatcccagcactttgggaggccgagtagggcgaatcacgaggtaaggagatcgagactatggtgaaaccccatctctactaaaaatacaaaaaattagccgagcctggtggtgggcacctagtcccagctacttgggaggctgaggcaggagaatggcatgaaccccggaggcggagcttgcagtgagctgcgatcacaccactgcaccccagcctgggcaacagagcgagactccgtctcaaaaactaacaatactaatctttagctggatacagtgactcacacctgtaccccagcgctctgggagactgaggcaagaggattgctagagcctgggagtttaagaacagcctgggcaacatagtgaaaccccatctctcccaaaaaatcaaaaaattagccaggcgtggtggagcgcctgtggtcccaggtgcttacagagggctgaggcaggaggatcacttgagcccaggagttccatgctgcaaggagccatgatcacaacactgcactccagcctggggaccctgtccccagaaaacaacaaaaataaaaacaaacaatcttcaagttaaacacaatgaacataaattcctgaaagactctccacatggggggaaggcctcttctatgccgcgtttattcccaaagactttttataagatttgatactaactatcagagttcagaaaacagaaagctcagagagtaaaatgaaggtaaaagatttggccaggcatggtggctcatgcctttaatcccagtactttggggggccatgccaggaggattgcttgaggccaagagttcaagaccagcctgggcaacatagtgagacttcatctataccaaaaacaaacaaacaaatcagccaagtactgtggtgcatgcctgtggtcccagctattctgggaggctgaagtgggagaattgcttgaactcaggaggtcgaggctgcaatgacctacgattgcaccactgcactatagcctagaggacagagcaagaccttgtctcaaaaaataaaataaaatagatttttaatttttgtatgaagaagcaggtttttttctggtttttttgttgttgttgttgtcgtctttgacacaaagtctcactctgttacccaggctggagtgcaatggcacgacctgggctcactgcagcctctgcctcctgggttcaagcagtcctcttgcctcagcctcccaaatagctgggattacaggtgcctgccaccaagcctggctaattttttttttcttttttttgatggtgtctctgtcgtccaggctggagtgcagtggcgcaatcttggctcactccaacctcttcctcctaggttcaagcaattctcctgcctcagcctcctgagtagctggaattacaggtgcacgccaccgcacccagctaatttttgtatttttagtagaggcggggtttcaccatgttagtcaggctagtcttgaactcctgacctcgtgatccacccgcctcggcctcccaaagtgctaggattacaggcgtaagccaccacgcccggccggttttttggggtttgttttgcttttttttgttttccttttttgttttgtatttttattagagatggggttttgctatgttggccaggctggtctcaaactcctgacctcaagtgatccgacagcctcagcctcccaaagtgctgggattacaggaaggagccaccgcgccagcctgaagaagaggtttaaaaagaaaaaaccaaaaacaaaaaaactaccaagtagctaccttagtcttttttggaaaaagaccaaactttaaacatttaataataaacaaatgtaacaatgaatccccagaaatctgaaaaggtgctgacacaagcatccgtctgtctgagtcacagaaaagggcagagggcacgaggtgcctggagggcctgagggcagagctcagccgcaacccggccctgctgcttagaggctcggggccttggcaaatgacagcctccctgagcctgtttctccatccgtaaaacaggcctcccagccctgtgtcggagcaactgaaacgagggttaaatgaggaaaccatgcgacagatgtcagcataatccctgccacgcagaggaggcaaaatcactttgaagggttaaaacttgtttctctggttaaaaagggatgtactcttcaaagttagaaaaataccttggccctctccctccccctccccctccccctccccctctccctctccctcaccccacagtctccctctcatgcggagccgaagctggactgtactgctgccatctcggctcactgcaacctccctgcctgattctcctgcctcagtctgccgaatgcctgcgattgcaggcacgcgccgccacgcctgactggttttggtggagacggggtttcgctgtgttggccgggccggtctccagcccctaaccgcgagtgatccgccaacctcggcctcccgaggtgccgggattgcagacggagtctcgttcactcagtgctcaatggtgcccaggctggagtgcagtgacgtgatctcggctcactacaacctacacctcccagccgcctgccttggcctcccaaagtgccgagactgcagcctctgcccggccgccaccccgtctgggaagtgaggagtgtctctgcctggccgcccatcgtctgggatgtgaggagcccctctgcctggctgcccagtctggaaagtgaggagcgtctccgcccggccgccatcccatctaggaagtgaggagcgcctcttcccagccgccatcacatctaggaagtgaggagcgtctctgcccggccgcccatagtctgagatgtggggagcgcctctgccccgccgccccatctgggatgtgaggagcgcctctgcccggccgagaccccgtctgggaggtgaggagcgtctctgcccggccagccaccccgtccgggagggagatgggggggtcagccccaccacctggccagccgccccgtccgggagggaggtgggggggtcagccccccgcctggccagccgccccatccgggagggaggtggggggcgtcagccctccgcccggccagccgccccatctgggatgtgaggagcgcctctgcccggcgagaccccgtctgggaggtgaggagcgtctctgcccggccgccccgtctgagaagtgaggagaccctctgcctggcaaccaccccgtctgagaagtgaggagcccctccgcccggcagctgccctgtctgagaagtgaggagcctctccgcccggcagccaccccatctgggaagtgaggagcgtctccgcccggcagccaccccatccgggagggaggtggggggggtcagccccccgcccggccagccgccccatccgggagggaggtggggggtcagcccccccgcccggccagccgtgccatccgggagggaggtgggggggtcagccccccgcctggccagccgccctgtccgggagggaggtgggggggtcagccctccgcccagccagccgccccgtctgggaggtgaggggcgcctctgcccggccgcccctactgggaagtgaggagcccctctgcccagccagccgccccgtccgggagggaggtggggggggtcagccccccagcccggccagccgccccgtccgggaggtgaggggcgcctctgcccggccgcccctactgggaagtgaggaggccctctgcccggccagccgccccgtccgggagggaggtgggggggtcagccccccgcccggccagccgccccgtccgggagggaggtgggggggggtcagcccccctgcctggccagccgccccgtccgggaggtgaggggcgcctctgcccggccacccctactgggaagtgaggagcccctctgcccggccaccaccccgtctgggaggtgtgcccaacagctcattgagaacgggccaggatgacaatggcggctttgtggaatagaaaggcgggaaaggtggggaaaagattgagaaatcggatggttgccgtgtctgtgtagaaagaagtagacatgggagacttttcattttgttctgtactaagaaaaattcctctgccttgggatcctgttgatctgtgaccttacccccaaccctgtgctgtgtccactcagggttaaatggattaagggcggtgcaggatgtgctttgttaaacagatgcttgaaggcagcatgctcgttaagagtcatcaccactccctaatctcaagtaatcagggacacaaacactgcggaaggccgcagggtcctctgcctaggaaaaccagagacctttgttcacttgtttatctgctgaccttccctccactattgtcccatgaccctgccaaatccccctctgcgagaaacacccaagaatgatcaataaaaaaataaattaaaaaaaaaaaaaaagaaaaaaaaaagaaaaataccttggccctggtagccagcttacagttcaggaattcgtccccgacgcactgtgctgactcctttaacttgttctgcacatcctgcaaaaggaaaacacacagcttcaccctcttctactagcagcaagaaagctgctgtggggtatgggtcactgtggagcgggaggtcgtctttcctcaggagaaacacatttccatatgttggctttgacattagtattctgcaatctcttgactctcccttagatgtttttctcaccaaacaggacagcctggcttcacagcaggagcaccacaaacctgcagcctctctccagaggcacagccactccatccgcagacggggggcagctctccagagaaacagccactccatccacagaccaggggcggctctgcagagaaacggcccctccatccacagacccggggcggcgtcagccccagagatacctgagaccctggtagcttccaaaaacgcaatagaacagggcaaaagtgtcttccttcctgggaatgcatccatggcgccagggacaccagagcccagggagctgctgggcagagggacaggcccagcccctggcaccggagccctctcatctgaaagaggcctcctgggcaaagccgtgccttaaagtcaggagccacccaggagatacaaggggaaaccctaatatgcagctgtttgcgtgtccaggaattctcaggtttcagagatgccttaaagatcatctgactcaactctcattttacaaaaaaaaaaaaaaaaaaaaaaaaaaagacctgaggcccagcatggtgcgtgcctgtagtcccagctactcagagcctgaggcgggaggatcgctggagcccaggggttcagggccagcctgggtaacatagtgagaccccatctctaaaaacagaaagcaagcaagaaaactgaggccgggaagtgacagagaatgatacctgtgggaaggccacagggaacgtcctgcccccagaacagggatattgcccacctgtgacccactgcacccctgcccaccgcccctcccaggtcctgccacattcctctgctggcaatgcagatcgcctccaaaggaaggtttccaaccccagggctcaaaagatcccactgcctgctccagacatccccgggggcatcccagggacatctcaggcacagggggaaggcccctctgcctccgagaggaacgaagacaaaaggaaccaaggcttgtgtgaagtcagcctgggagagggggtgtcttcctgcagcagggacaaggacagaggccgtcaggtccccattcaagacggggtttccctgaaatagaggagagcctggaaacctctattccagtggagcccccgcccctccccgcacagggagagggtcctgcaggcacaggtggaggagaagcacaggacccgccttccctggaggggctggcagctgcttcctcctccaggaaacaggagctgggctgcagggttgttttttgtttttttgagacagggtctcactctgtcgcccaggctggagtgcagtggcacaatcacagctcactgcaagctccacctcctgggttcaagcgattctcatgcctcagcctcccaagtgactgggattacaggtgtgcaccaccatgcctggcctcagttttgttttggtagagacgaagtctcgctatgttgtccaggctggtctcaaacgcctgggcttaagggaccatccagcctcggcctctccgagcgctgggattagaggcgtgggccactgtacctgcgaactgtagcttcttgacacacaataaggctgtgccgcagcagctgggaggagggaagccccactcagacctctgacggagtgcatgtacaacaagttaattcccggatgcaggtgtgggctgtggctctgacaaggaggctcagcctgtgttccagtggtccttagtcagacagggccttgttttaagtcaacacttcttcccatctggagtctctggcacctccctaaaccctccaaaccatccagcctaaatcctcaaagtgaccacagagatccatgatctccacgcggatttacaaaatcctgcaaagtcaacaccagggacacctctgaaaatcacattcagactgttatctggaaaggaaagaagtcttgtccatgtcattcctgctgggcgtccaaacaagggaccaggaggataagaaaccacacctgagagaggaaaaggcgggtccggaggctcggggactccccggggccgggacatgggcagggcagacacactcaccgagccgctgaaggacaggaagagcttgaggaccacatcctcggagaacagggggtgtcgcgccaccaggttgacgaagcgcttcagggctctcctcctggcctcgatgaactccctgtcagctggaggagcacacggggtcactggacagagtccagggcgccggcccccatcttctgctctgggcgagttctcaaaactctccctagaggtggcagagggcccagcggctagcagagggcactggctgggcccccagtgctgctcagacaatgggtctgaaaaggccgcccagagcaataacctcacccccagaggccccctccagccacacacacttgggtccaggagctgccaaggaaaaccacagatctgcttgtttccatcgggagtcctgggaaccacgtgagtggtcactttaatcacctccgttaaagacatcttccataatcccctcctggcacttctcactgcaaacaaatgggttttgctacgctctaacactaacgcaacccaggtcttcttttcttttttttttttttgagacagagtttcgctcctgttgcccaggctggagtgcagtggcgcaatctcggctcactgctacctccgccttccaggttcaagcgattctcctgtctcagcctctggaattagctgggattacaggggcccgccaacatgcctggctaatttttgtatttttagtagagatggggtttcaccatgttggtcacgctggtctccaactcctgacctcaggtgatccacctgcctcggcctcccaaagtgctgatattacaggcgtaagccaccgcgcccggccgagtttttctattcactgtgcttataacttactctgcaaaggatgcaattactcattgctttcattcgggttaaatattttcactccaaggggaaaaaaagtaaaagcatatactgatgcattcaggacatttcaatctgaacacaaacaaaaatggtatttaaatactttttttgagacggagtttcactcttgtcgcccaggctggagtgcagtggtgtcatctcggctcactgcaacctctaactcccaggttcaagcgattctcctgcctcagcctcccaagtagctgggattacaggcacccgccaccacacctggctaatgtttatacttttattagagaggaggtttcaccatgttggtcatgctggtctcgaactcctgacctcaggtgatccgcccacctcagcctcccaaagtgctgggattacaggcatgagccaccagcgcccagcctttaaatactatttttaatgtattaagaaatacagccaggagtgtggctcacacctgtaatcccagcctcttgggaggctgaggagggcagatcacttgaggccaaggagttctacatcagcctggccagcgtagcgaaaccctgtctctgaaaaataccataaaagaggccaggcgcagtggctcacacctgtaatcccagcactttgggaggctgaggcaggtggatcatgaggtcaggagattgagaccatcctaacacggtgaaaccccatctccactaaaaatacaaaaaaaaataattagccaggcgtggtggcgggcgcctgtagtcccagctacttgggagactcaggcaggagaatggcgtgaacccggcaggcggagcttgcagtgagccgagaccgcaccactgcactccagcctgggtgacacggcgagtcttcgtctcaaaaacaaaaacaaaaacaaaaaacaccataaaagaggccaggtgcggtggctcacacctgtaatcccagcactttgggaggctgaggtgcgcggatcacgaggtcaggagattgagaccatcctggctaacacggtgaaaccccgtctctactaaaaatacaaaaaaattagccaggcgtggtggcgggcgcctgtagtcccagctacgcgggaggctgaggcaggagaatggcgtgaacccgggaggcggagcttgccatgagccgagattgcaccactgcactccagcctgggcgacagagcgagactccatgtaaaaaaaaaaaaaaaacaccataaaagaaagaaaacaaacaatacaggtaggtggctggggctccctcctggctcagcactggcaggcctcttccgatgaggctgcacttccttaaatgcgcaagcggcccagcgcgcgtgtgcagtttccaggcgctgaacgccagccagcgctcatcaactcggatgcccaggcctgagccagcatcacacatccctgtcgcgtcctctgctctctgctgccctgagcgcccgtgtgcccttcagcgtgagctgaatgatctgctctgtggccttcacatgcggcggggtgaaaatcacatcatcagaccctgggctgcttgctcagtgaccgatgagaggcagaagcatttatgcatcatcgtacgatttcagatgcggggaactggcgactgtgttagctcccatgctgcgtccccgtccaggacacggtgactgtggaagggctgggaacggcagaaagccatgatcagctctaagcactcatttccccagcatgttttattcagaatttgaggaacgggctgagggagagaccaccagtgagatcagagctggcagccgccatcccaagctctgcagcccagggggacacaggcctggggagcagctctgaggtcgtctgcgatctcccacctggcccgaggccatcttcaggcagagaggtgaaggtgaggcagccgtgtgctgctttttctctcctgcaagatgcagctgacatttcctacttgcacaactcagttctcttccatgaggccaccgagcgctcccatggtgcccatggctcaggctgccatggctttgcagatgcaggcagggcaatgccagccaggtgagcacacagtgctcctggcagccctctcgggagctctcgggagccctggccactgcactctggagaggagaactagggttctctttcacacctgcacagcaagggcttccccacctgtcagtcatgcagctgaaggctctggtgggccaaggctgccgggtgccagtctccctgcctgcaccaaggctgggctcaagccacagctctgtcccagatgccaaaaggctggagtttcccccgcagccctgcacctgccccggtctacagtggggtccatccctgagccaggaccacagggtccaggagatgggctcgctccctccgcccccggtgggcagcacgcctggctttacctcccagcattctcttgggtggcagggcaggcaccatacggtaggggaacttgtgcaggagcatctcctggaagaccacgaagtcattgtaccgtctgtataccgaggacttgaagcgctgcaagagaagggtcggtgcttagatccgacgttggaaactatgctgtcgcgtcacttcccctcaacagagcccgggaaaacgacagcaccaagtgcatcttctctcaccaggcctttactaaatggagaaaccctgtgacggcttcgtatatggaaatacaacttttaaactttgtatagctcttaggccgggtgcggtggctcccgcctgtaatctcagcattctgggaggttgaggcgggtgaatcacctgaggtcaggagttaaagagaccagcctggccaacatggcaaaatcccatctctactaaaaatacaaaaattagctgggcatggtggtgggcggctgtagtcccagctactttggagcctgaggcaggagaatcccttgaaccctggagacagaggttgcagtgatccaagatcgtgccactgcactctagcctggacgacaaagcgagaccttgtcttaaaaaaattaaaaaaggccgggcgcggtggctcacgcctgcattcccagcactttgggaggccgagacaggcggatcatgaggtcaggagatcgagaccatcctggccaacacggtgaaacctcgtctctactaaaaacacaaaaaattagccgggcgtggtggtgggcacctgtagtcccagctactcaggaagctgaggcaggagaatggcgtgaacccgggaggcagagcttgcggtgagctgagatcacgccactgcactccagcctgggcggcagagcgagactccatttcaaaaaaaaaaaaaaaactaaacaaatggtatgaagcatagtggcttcccacctggtcagtgactggcccgttacacacacatcagggtgaccaaactgcccccttgacaaatgttccctatgtggcaatgaatttacttaagggacgggcagcttagtaagactggacaaaaggccagccgctggctccctggcaggcaacggcacgtctcacacgctcagagttgcctcacccccaggctgccaggccccagaaggaaggggtggctcgctctgctcccccgtggcatcccaccagctggtccacatccccgactgcggcccagagggccgggaaccacggcaaagccagacagcaaggcggctctgacacggtcctccaagggagtcctcccctctgacccgctttgtcctttggtagcagtactgacaaccattcggaccgtgtggccacaggctctggaacacagtgaagcacagcagagcagacggcagggaggggagaccggctcgcttgtccttaaggccaggtgcagtggctcatgcctgtgagcctagcactttggcgggccaaagtgagaggactgcttgagcccaggagttcgagaccagctgagacaacatagcaagtctccatttgtactttaaaaaaaaaaaaaaaaaaaagactgggcatggtggctcacgcctgtaatcccagcactttgggaaaccaaggcaggaggaccacttgagcccaggagctcaagaccagcctggacaatatagtgagatcccatctctacaaataatttaaaaaactgcctggtgtggtggcatccgcctgtggttccagctactcaggagactgaggtgggagggttgcttgagcctgggaggttgaggctgtagtgagctatgatcgtgccactgcactccagcctggttgacagagcaataccctgtctctttaaaaacaagcaaacaaaaagacacaacttttacccaggaccatctgctcatgacgcttttcaaacaagcccctggcagtgccgtccggccggggctgggccagggccgccctctcccacacaggagtgggccctgctctgtctgtgcgaatcccacaagccctgctgactccacacctcccaaggacagtgttagctcatcaattactcaatgcccaggatgaacaatgaaaactcccatcagaatctgtcgtaatggaactgagacaacgaagcaagggacagagagagccacggtgttgctccagacgggcatcaggcactcggtgtctgtgtctcacctgcccaatatcgggatgcccagcaacaggagggccgtgttattaaaggggattagagtgacacatattgatcctgccatgcaaatttcattcactgtttggggtccggagtcgatggggctgacattctaatcctcgggggtttcccactattacaaagcgaggctggtgtggatcccgctttgtgctctgtggaccgtccgcgggagattcctaagaaacaggcctccaggccgggcgcggtggctcacgccagtaatcccagcactttgggaggccgaggcgggtggatcataaggtcaggagatcaagaccaccctggctaacatggtgaaaccctgtctctactaaaaaaaaaaatacaaaaaaatttgccaggcgtggtggcgggcacctgtcatcccagctacttgggaggctgaggcaggagaatcgcttgaacccgggaggcagagtttgcagtgagccgagatcatgccactgcactccagcctgggcgacagagcaagactccacatcggggaaaaaaaaaaaagaaacaggactccagagcacagtggtggggaggacaaactggaccaggggtgaccaggtggggacgtggctgggccagagtgaggtgcggggagcagaggtgtggaaaagtcacctccgcagcctgactctgctgcgagttctggatcttgcctgtaagccagccacacagactcacccttcagccttctcctgtcacaccactcctgccctgagatgttgagacgtgaccctttcttccccctcctgccccgacacacacacaatttgccagttacctggctggaaacctcatactccacatgcttcaggaagaggcccttcttctccggaatgagctccacctgcacggtgtccctggccagcagctcctgcagggtgtgggacagcagcagcgggttcccctgcggcatctgcattcgactgggggctgggacctgctgcacgatggcctggggctcgatggcctggggtgtcggcagatct

SEQ ID NO: 28 - DNA, 3143 bp, Homo Sapiens
ctattcaaatggggccgcgtcccgattatcagtgcaatgtgatcacttgattttaaacgcaactatgcgtccaaatggctgagtgcaagaggtcggccggagatagggccgagtgcgctgccccaagctgcgatccctgccaagcactcacggacaatgcactggtttcctccagggagcgtcttccatccagggcagcagtaggagtggaatctggagccgcacacgttgggcctgtgatggacaagcgcggtcacgtaacagataggtagagggatgcagcaacatataaacggtcttcgtaagcaatgccccgagcgagtagatttcaggacaacaaacaaatcaaaattacacttcaaattattggagatcgggaggcagacgtggaagcaaaagagctagatgctggaatgcaggagggtcagaaatgtctaaacactgcctttcatctgtcgtcccttgcctgcctttttaaagggcgaaaagaggcatggaaacatataatttgctactattctagcttccagatgcagagaacaaagggaccattccgttccaaagaatccttgccctccttcccaaatccattcctccttggtcaactgttactttggccccgacgtgtcaaggaaagcgcgtcgcaaggtggagcgctcgggttgacgatgagaaggtgagctgtgaaccctgcacacgtcctcaaacaaaaggctcacgagcggcggccccgacgtggggagcaagcaggcttctctggcccctgcagcaggcggacccaggcccgcctgccgccggacattcagaacctgttcccgcagcgcgagctctgcacacgctctgcgatcggcacccctggaccccctaaccacccgccgcccaacccccggagagagggctttccgcccgctgagctgcggggttgggaaggaaaagggggacgcgctcctgggggtctttggatattctggcaaagggggctgcagctctaggctccagctaaagggtctgggacggagtgggccagaaagccgccaaactgaggattcccccctcccccaagccggagccctaggtgcggagccgcttgcccacttaccctcggagcacgtcctgctgtcctcgccggcggacgcggctggccactgcggcaccctcctcgcgatactcgggcgctagaaacccgccttcagagcctgctgtagcggaccgaacctgttgcggcggcggctggggccggggcggcttgggcggaggaggctgaggctggccggccgtgccctgcgcccagagcaccacacagcccagccacaggaagtagagctggagacacagcctccgtcttctccccatcgccggcgccgaaagcgcgcggccgtagacccgcggagagggagtgatcaaagacaaaatctgcgcgcctcagaaaagagtcagggtctaataagcccttcgtcggctccggggactccctcgggctcgggctccctgctctagctggagacctcgacagagcgccggccccctgactgcccgcgaagcgagacgcggggcgccgggtctagcgcagtgagcggcgaggcgcggcggaggtgcagccggcagccccgagcggtacacgttgcataaccggcctaaagccccgagcgactccaggaccgtcagcgggcgggggaggaaattacaaaagccctggcgtaaaatttcaaaaaatgtgaacctcaaaagaaaaaagggcctgcacgcagagctcggcggattcccgtgcgctccgaagacggatattggaaagctgcaaaagtcaccagaaagaaacaggcaagcaaacaaaagtcgcccccagaagaagaggagggttccctccgggctcgctcggagtcccacagggcaacgaagcgcgggtagcggctgcggagccgggcggaggtgcgcggggccggggcgtgcggccagcaagagagagggcgggaggctgggcgctggagaagatgcggcggtggagggcgcggcgcgggggttttagaggcccggcggggcgcggggcgggccggcgggcggcggctgtcagtgggggcgcggccgtccacacgtggggctcaacccggactgagaggccggcgcagagtgggcggggacagagtaagggagagatcgggactgaggaacgaggggaaccagggttgggtgaggggaagaggaaggaagggggggagggcgaagggagggaagaggacggagattggggagaaggggggcgaacccgagaggaaggccgggctggaagagggacttggaaagagggattggcgagcccgggtgcgagaggaaatgagcgggggatgggggcgaagttagggcaaagagagaagtgggaaaggagagggagggccaaggtccgggcgccgagaggaggggcccggggggccggctggagggggcgaggcgctaggcggctttgcttcccgtccccgtcaattggccgctagctctgttttgactgcctgtacaaagcgagtagacggcgggggatggggcgattagggaccggatttgggaaaggaggcagcagccccttcccctccccctccgtcctcgcccggccgcggaccagggactagggtgcctaagcgcgccaggcttggccggacccgcagctgaactgacccgcagctgaacttccccgccggacagaggccgcaaggttgaggatgagaacgggtctttctgtagggtcccggcccctgacctgggatggggggattcgcagtcagccaggaatagaggctcacggggctgttggttgcagcctcaatccaagaaggaggagacctcccctttgccctcctacccccaccgccccaccgggagcggcgtcagtctgcgggaccaaattaggggctgggagtttccagattgaaatgcgccctccaccaccaagagggagctcacgcggccgcggggggccgaggcagccagccggcgccgcggtcctggggagtccgtgcaggggtgtgctctggtgtgaaacctggcaggactctgcctgggcttgcatgcagggaggggttagagactctgaaatgtactagcgggcagggtggtgacaaggcgggtaaatgaggctcggggcatgcccttgcttc

SEQ ID NO: 29 - DNA, 6676 bp, Homo Sapiens
gaccaaacgaaatatcgtaacacaaggcgaggcaggcttgtgggaaccggtccccagcgggcggcggcagagcggggaggattggaggggccagggctgggggtggcacgggctcttgggccgctgggctcctctgggcgggctcagggctggaaggcgctgccagctgtagccaggctcatacttttcaatttgttgtccttcttccacttcatgcgccggttctggaaccagatcttgatctggcgctcggacaggcagagtgcgtgggcgatctcgatgcgccgtcgccgggtcaggtagcggttgaagtggaactccttttccagctccagggtctggtagcgggtatacgcggtccgggcccttttcccgtccggcccggtcatatctggagcagatagaggaaagccgcaaggcaacattattccggttaagggagggggcactgggtgggagggggcgggggagcaggacccaggcgtcccggcacccagctcaccacagctccaatcctctctactccagatgcccacattcaagctcgatttctgcacccctttctactgcatcccccacttctgcaggcagccagtgcgcccggctttgtctcttgctcgctcctagtgcctcacccttggctgggctcaggcggccgctcgccccgggagggaggagagcggttgcacttttgccccggaaagctccttttactgttcaccccttctttgctagcgacagtctcaaaatttcaggggtaagcaggacccttccccacattatatgaaccccatcctttatcctaaagctggttcagctgcgctaataaaaacctaagccgaagctggaaacaaattattaaaaatacccccctcttaacagagagaccctttttggctctgtctacgaagctatgaggcccctcttagatacttctcccccttagaaaaatgaatctatatttagggtaaagccaagctctccttgtccccccgatcccaccccaaaacgcagagaaggaaagccgagaagacaaaaaagagagagagaattaccatggctgatgtgaagcttcctcatccaggggaatatttgcggagtctgcccctcgggcgcggctgtggaggtggccatgggctctggctgcgcccgagctaggctggggctgcttagctggcttgccgcttcctcaggctccgaggacgcgctggcctcgtctatttcggtgaaattggcgctggagctggctgaggtcgcctggtcggagggggacgaagcagagggcttggcgccgtggctgtcgccgttggtgcagggcagggactcgggcgaggacagggagcagctcgaagccgcttgcctgaagcggggctcctgggcgggcgcggggaaggcgcgcgagctctcgcccaccgccccaaagtggctggaggaggccgaggagcggttgacgctgaggtccatcccattgtaattgtagccgtaagagccggtgtgcatggcagcgggatccctgtaagagccgctcagagagctgccactgccataatttagcaactgatagtccgggccatttggataacgccccgagaaggagtttacaaagtacgagctcatttgggtgattttggagggcttgatttgtggatcgtggtcgttataaccctgtgcttcacgatttatgatgtattaatgaattatagcgatgcactgtacttcgttttgctatgtatgcggccaaatatggggggggggttggaaggggggtggggggcgttagggaatcacgtgcttttgttgaccagtcgtaaattctcgctgatgacctcaagaggtaattcatgctctatggttacaaataatgacgatccgagaatcgttagggccgattcaatgcgagcctccgagagagggggaaaaaaggagaagggggagaaacagagagaaggttggctttggcctctgagcagagcgcgccacctcccggcgaccgacgggagcgcgggcgtgagaccgccatggcggcgggcggctgcctccctgctggctccctgcaggctccctgcagtcgccgggagagaaagaaacccggccaaggctcagccacagggttgagccttttagagcaggggttgggctttttacccactttcttgtgggtggggttagcctctctatttggttctttctccctacatcatcattgtcgttattattttaactttggatgagaagatcaaagatagagttgcttttccctttcttgggctttgcaagtctccgaattggaggcggaaatgggggaagggttggaagttgtgtgtgaaaaacaattattgcaacgggttttccccaggagcttagtccggcctgcatcctggtggaactgctgttaccggtccacagcgcccaggccgagccggcagggctgggcgggaggcttgaaaaagaaggagaagcgttcacttctcctgggccacttggaagttcgaaatccccttccggacctccttggtggtccttagcccaggcgtggggagtgacagagcaggacagggaccccagaaaccgagcacagctggggctaagcggcctagttgccgaaaagactgcagcggccaccgcgtctgctgcttagtttgagtagtaacatgtgtctgagagtttgtaaagcgggatcccttcccctcctcctcggctattgcattcggaggccccactacaggtccctcactcgcagctaggcagtttgagaatttgcctggtggcagccgccttcccggaaaaggggttccaaggacccgcatgctttgctgagcacgctgggcggccagagaccgccgcagctggtctcctattaggaggggactattttctttaaaaataagaaaggaagcgagagggcggaggaataaaggaaaacagtgaccgcagcttgccttctgggtgccggtgcaagcagagagagaatgagccattctgggttgagaggatgacactaaaagccccatcacctggcctcctgccctggggtctccaaggagcaagggaaagttgtggccttcggcctgtgcctggctggtggctttacattcccctacttgaggctgatctcctacttgaggctgatctgctacttgaggtgggaaggggcacctggagccttcagctgcagggtgagagatacccagtggccccatttttcagtctccagagccacaggccaggagcggagggccaaggctggcgaaaaaacctggccatgtggacgggccaaagaccaggggtcgctgcgaaggtgaggacagaaaagcgctgcagaggcccccagactatggctccgtctccgccagagagctttaggggcctcagtggctcccttagtgctgtgtatacacgaggaaaggctagagaatgagagggacacagcacctctccatcccccaagtctgcacggggagaagcggctgtgagcctcagcaccagggaaacgcagcgctggggcctgggcaggactgatcgctccagcctttatctcagctgtaacttcccagtcgaacagggctcgcttcggcgggccagggctctcgcctttgctgaagaattctggctcaggaaagatggagaggctgggggttgaggagagaggaaaaaatggcaggggaggattggaggtgaccgagcgtcgagttttcacatctttattattgttgttgttgttgttattattattattattatcatcatcatcatcatcatcatcatcgaagtatttcacgtccagagctaagacaagactacaaacacaacacatagaaaattaataaaatagaactttgttttcttctgaggctcctcttcttacttctaggtagtatgtgctccttccagtggctttggggagggggtgggagagacgacaggtctgggatcagggagtcttcaaggcccccgctgaggggacagcgaatctaccattgaaccgtgcacgggggacatggacaaaatgagacgcgacagggacaagagcattttgctctgcttccaggaaacatcaagtgagtccgctcctcagttctcaccaggaagcctgatcaggctgaggcgagttcctcgggaaggaagggcgcgcgggatgctgggtgggctcgagtagtgaggcctcagagcacccgccgggagctgtgcgggcgggggcgtccaggagagcgctgggccccgcctgtctgcgccggagagcaggtctcctggctcccccacccgagagccttccttcccgggtctctctgacgccctcggctccccacaggcctttcccctcgcgtcctccctccctttccagcaccttcactcggcctgtttttcttcctcctcctcggcactgagctgagacgcgctgagcagtttgctctcctttttccacttcatgcgtcggttctggaaccatatcttgatctgcctctccgtcaggcacagggcgtgcgcgatctcgatgcgccgccgccgcgtcaggtagcgattgtagtgaaactccttctccagctccagcgtctggtaacgtgtgtatgtctggcggcctcgccggccgctgggcccaaaggaggaacctgttacgcagagtggagatgctgaggcctgcggtcaccgggcccaggaccccctcccctagtcgaccctcgaacacagactccagccagtaccgggatgccctctattctgccggctcccttcccccgtttcgcactcctccagcgccccctccagattccctcctagtctcctaggcctgtgccgtctgtctagactctagatgggggaggggaggagcagtttgaactcccacctgagcctggggggaggggctggtcaggtgtgtctcttcctagttgcatcttgtctttccctccctttccatccatcttgttcccaccccccgtcatccccccaacccaatgataaatccaggccgttaatccgtaatgacgtagatcgatccatagtccacattaacggctcctcactttcgagtccggctaatggacatcagttgggacttaaggccaacaaataatccaacctgagaccccgcgcctgtttctccctctctcgctccgcctgctccctctctcttccttccccttattcctcctccctcctctgactaccacccctttcctggtgcctcatcttgccccagctccccacccacagggaaacacagtcccagacagactcaactctttctcttcagcgtcaccccctacccccttgcatgacgcactccgtttttaatggagccgtctttggttggggaaccctaccagggctgggagaggggggttgggggctcaaagtaaagccaagccagtgactgcaggctcctgctcccttccctgtcctggaaccccggctctggccaggcgccccaggagagcacacttgctccccatggctcccagtgcggctgggactttgcaaactttgtaactcctgcctaataggggacacagcgagagacccccggccggcgcccaatcttcttctatctcctaactgagatgcccacccagcaccctgtgggagattggggcagggggcgctcactagttctgtgtcccggggtgggcgcccaggggagccggggcgacggcgacgggaagtctcactcactgttgcacgaattcatccgctgcatccacgggtagaccggagtggagcacttctgctcttctgtctcgccgaacacgctcttgtcctgcgcgcagtccgacttccgcggctcggggtggaacgggggctgctcgtcggcgccggagagtgcgcaggccgactctttctcgcggtagaaggccggcgccggcccgtagtcgcagggcgccgctcggccgtagccaccgcccgccggcgggtaataggaggaagtggcaaagcccttgtcctggcccggccctggcccgtagggcgcggggtaatgtctcagcgggtccgcatagcccgacgaatagagcggtagctggcccaggaaggactcctgcccgctggccagagtgacggggaaggtggagttcacgaaataggaactcattgggaggggaggcgcgcgcggccgctgctgctccgccgggtttatgatttgttgtgttttatagtccgagcgccgcgcctattagtagtatatccgagattgggttttagctgaggggggatggcgaggtgccagtgagggccagaaggaaatacaaccatctgatccaacactgaccaatggcagaggcaggaattgtcaaatagcacccaggaggagcgcagcccgcacgagggacccgcgcacaaacctatcaacctttttttttttcctccttctccttcgcctttctcctctctccccccaacaacacaacgcgtcctgttccacctacgtaggatctgtgaaacaggctcagtgcctttgagggaggagggaacgtttagattgagaccaccccactcccgggtgattaaataaatatgtctctcccccaccccacgcaggattggaaaaagttaattgtgttttcagaaaagttaacccctgcgttgcttcgaccccttctctccggggagggttgggtaaatgtctccgaatcgccttgagagagaactaaagaaggtttgtttctagggttttgtgtcggta

SEQ ID NO: 30 - DNA, 11656 bp, Homo Sapiens
gtcaccgcctggcaggggctcgctcctttctctggtgctgctcattcgcgaggcctgagacgcggaccgtcaccttccccgggcccagcctggcctcaatgcaggcctcagagagagggacaaaacccggcccgcctccctcccctccccaaggcgaccaccagtgtcctgggggtccacagggcctctccagctctgatccgagttcccggctgcagctggtttgggtctgtgggggcctcgcgcagggaagcggaggccccttctctaggctcctacatcctcctggcctgccccagcagagctagcggccctccgagacagctgggcctcgcagctcccagccgaggcctgtcgctgggagaaagaagaatgaatgaagggcggaaggggcggggaggggcggggcgcgccgcgccagctcgcggcgcccccaggccgggccgcagcggggcgtggcctctagaggcgtggccttgggcgtgggggcggggttttctggtgggggcggggccgcgcagggccgttcccgccgccggccgcccgcgccccgcccccgtgccgcagctcacaggccccgcctcggtccgcccctccgctcgctccccaagccgccgcggcgccgagccggtttccccgccggtgtccgagaggcgcccccggcccggcccggcccggcccgcgccctccgcccccgcctccccgggccggcggcggtgggcgagctcgcgggcccggccgcccccagccccagccccgccgggccccgccccccgtcgagtgcatgaggttgacgctactttgttgcacctggagggaagaacgtatgggagaggaaggtgcgcgggccgcggggtgtggggcgagggcctggagggggtgcccggggcagcgtggggcacgggagggggccgggtctgccaggaggccgcgcccctgcctcctccgggatgagctcgtccttacgaagcccgcaggcccctccctgtccccctcccgcccgggatccccctccccggcccccggcgagctgccctcctgcgggtctgggggcccctggaccctttttcctcctcccacgtccccccgcgaaggactcccagacactgcccaccccgcgtcggcctccatccgcgtgctctgtccaccacccgggcctcgccctggggccaccctttatccagtctcggaagaaagagcggctggggaagccgcagccccgggtcccagtggccgccgggcgcctgcccggctctgtgaccttgagccaggcgctgacttcctggtcctcagtttccccttctgtacatttggaaactgggtagttgcccccccggtgtcggtgattgggggccagatgggtagagcggagataggcgtccaggaagccggaggccgtgtactgcgggagcctcatccactctccctgtccgtgccccaaacccggtgcctgccctcagtcttggctgggagcatgactcatcctaacctcctctttagccccttctccctcactggggcccaaggcgcagtactgcactgcagttagggttcaaggactcccccagcctaggacagggtctgggggcccctccttggatctccttcgctgacctgtcacttagatccacctggccccaaggcagggcctgactccacacctccccctgccaccaactcttcccaggcccatgaaaacctgattggggtaggggcccaccttcctgtagcccctgcctacctaaggtacctgcgtcttcacagagggtcaggctgttgtggccttgggacctagctatgtgactgggcaagccatgccatctctggggctcagtctccccttctgtacagtggagaggggcaggtctggggcattttccagggcccaccagctccaagggtgccaggccccaaggatgactaagcatgcctgtggctggctagaggaggtgccaggcctccctgggacaggtgtctgggagtacccaggtctgcagccccctccccttgccaagccagggcattcattgccaaggatctgttagggccggcacctccaggcttcctgcccttgacctcccagctggcttcagcccaggatgcactaatccagccctgtccagtccctgcctttgaagggccctcttagtacttcttcctgggcaggagagggaagaaaggaggctgtgataggaatgtcacccactgccttatccctaaagccactgcttcctttctcctcatttaccttgccagatccaatgctatagcgggaggatggacctgatcctcctcctaagctgatacatagggaaacagggccagagaagcttggcaacctagtcagtatctcagcaagactcaggccagcgccctttcttctcctatttggcacagcgactgccctgcctgggcgctgcacatgtgcagtgtgcgaggattggtgcaggtgtaggtatatgtggggtgggcagggcaagctgggcctgcaccagatcacacttcctgagaatgcttcccaactcccttcccaccctgcaggaagcgagttgcccgtgtgtgcaagctgcggccagaggatctatgatggccagtacctccaggccctgaacgcggactggcacgcagactgcttcaggtagggtggggtgcccagggcctgtgttgccctaaacaaggcctgccagagaggacaggctggtcaaggaatgggggaggccgggatatgcctcctggtgccgtcccctattgtgacttcgtggccttaatttaccatttatgacatgaggtgttttgactagaaaatccctacaggccttcctgttgtcattttatttatctatttttttttctttttgagacggagtctcgctctgtcacccaggctggagtacagtggtgcgatcttggctcattgcaacctcttcctcctgggctcacgcagttctcctgtgtcagcctctggagtagctgggattacaggcgtgcaccaccacgcccagctaatttttgtatttttagtagagacgggttttgccatgttagccaggctggtctgaaacttctgacctcaagtgatcttcccacctcagcctcccaaagtgctgggatgacagacataaaccaccgctcctggcctcattttattttcttttatgtatttttcttttttcgaaatggtcttgctctgttgcccaggctggagtgcagtggtgccatctcggctcattgcaacctccatctcccgggctaaagtgatcctcctacttcagcctcccgagtagctgggattataggtatacaccacaatgctcagctaattttttaaattttgtgtaaagacagggtctcactattgagacccaggctggtcttgaacttgtgacctcaagcaatcctcctgccttggcctccgaaagtgctaggcttacaggcgtgagctaacgccttggcctctgttgtcatcctagatctctgagatctaaatcttagagaggatgggagagacctccaattgagccagtgcctgcaattcagccccctgctggcacccagacagggggaagagttggaaggaatgtccctcctgccttctgggtgttcatgctcttgcagggagggaagacaaaccaggccttaagggaaaccaggccaccctcagtgtcttccaggctgcttgcgaacatgcataacccagtcacaccagccccagtgtccagacacacacccacaggtaggaagaaagtagggtcagggttgtggcggaggataaagagtacatgaggacctgaaggtcacccagtaggaccatcctgagaagccaggagcaggggtctacctgccttgagccagagcagggccagagcaggggtctcaaaggatgtgagatttcctgggtagaaaagtagagtggaggtggggcgtggtggctcacacctataatcccatcactttttggggctgaggtgggcagatcacttgagttcaggagttcgagacaagcctgggcaatatggcaacaccctgtctccactgaaaatacaaaaaattagccgggcgtggtggcgcatgcctgtagtcccagctactcaagaggctgaggtggcagggttacttgagcctgggaggtggaggctgcagtgagctatgatcgcaccactgcactctagcctgggcaatagagcgagacccagtctcaatttttaaaaaagaaagaaagaaaaacaaatggtgtgggagagaattacaggcatagtcaccaaacagcaaggttcaggggagaaaactccataaaagggtagaaggtgaagcttctgggatgcccagcaggggtcaagacatccaccactaggactttattttaggcttctgccttggtttattttttggtttttggtttttttgagacagtcttgttgtgtcgcccaggctggggagcagtggcgcgatccctcctcactgcaacctccgcctcccaggttcaagcgattctcctgcttcagcctcccaagtagctgggattacaggtgtgcaccaccacgcccggctaagttttgtattttcagtagagatagggttttgccatgttggccaggctggtctcgaactcctgacctcaagtgatctgcccgcctcagcctcccaaaatgctggaattacaggcatgagccactgcacctggcctcggtttgtttttttgtttcttcttttctttttttttacacagggtcttgctgtgtcacccaggctggcgtgcagtggtgagatcatagcccactgtagcctccagctccaactggttcaagcgatccttctgactcagcctcccaaagtgctgggattacaagcataagccaccatgcccagcctgttttttcttttttaggaataacgtctaacgttttctaacattcagtaagggacaacccctgttctaagtactttgcatagttagatattagtgctgtctttgttttgccagagagaaaattgggacacagagaggttaattctcttgatgaaagtcacacagccagtgagtgaaatgaacacactcagtgtggctgaaaggagacagacagcatgccctgggattctgcatcaggtgctcagaaagaggccttcggggggcaagagggctctcaacaggcagaggaaaccatctgcacagcggtgggatggtgcggactgctgagggaacaggaacagttcccttggaaggaacagaataagctgagggatccaacaagaaacaaagttgagaccgattcgtgaagggccttgaatgccaagataaggagtttcagaagtcaggatgggggtggtggctcatccccgtaatcccagcactttgggaggccgaggcaggcagatcacttgaccccaggagcttgagaccagcctggccaacgtggtgaaacccccgtctctactaaatattcaaaaattagccaggcatggtggcacatgactgtaatccaagctactcgggaggctaaggaaggagaatcacttgaacctgggaggcggaggctgcagtgagctgagatcacgtcactgcactccagcctgggagacagagcgagactccatctcaaaaaaaaaaaaaaaaaaaaatagaagggagtcggcagaaagccagggaggggctggggtgacatgctgttgaagaatgccatcccagtgggccggtggtggtatctaggcagggaagggactgtcccagtaactcaagggtctgagctcataggacctgacctgggacagtgactgaggatggagagaatttcaggcagaagggacagtttttggtgagtatttgtcatattggctaccatgcattgagcactcttcatgctaatttgttaaatcttcatcataactctatgagggactgtatgtgcccagtttgcatgggagaaacagagattccatgcaatcaagtgcctcgctgaaggttgtaacatctagagctgggactaaaaccttctcactccacatcgccacagagtaggaaaggcaggggctggcggtggcacatgcctataatcccagccctttgggaggcggaggcaggtggatctcttgagcccaggagtttgagaccagtgtgggcaacatagtgaaaccttgtctctacaaaaaaattagctgagcatggtggtggtgcctgtagtcccagctactcaagggcgctgacatgggagggttgcttgagcctgggaggtggaggttgcagtgagctatgatcacaccactgcaagccagcctgggtgacagagtgaaatcccatctcaaaaaaaagaaagaaaggaagaaagaaaaagacaggggcttcggggagggcatgggcactggcgaatggcagggtggaacctgaagccatctggttttctaacctgggcactggggagttggtggtttgttgactctgatggaattgggggtcatgttggggaggagacatgctcatctgtgttgagctggaggggacatgggctatccatggtggctgtgtcctgcccagagctagccatgggagcctgagtccagttggaggtaggaaagtcagaaaaaacggccgcctcggagctggccctgagatggtgagtgggatttgtgatagggccaagacgaatgaagggaagaactttggggacccctgtgtctgcggtgaggggggagatggagccttgggtgatggagagagggtcaggagtagagccacagaagccacaggagggaagccgtgttacaggatgggtgtacctggctttggagtggcctgtcccaaatcactcaccaggagaggggtgagtccccaggtcagggcagtaaagaggaggcatgtttgtgctgtccctggtgtagtgaaactcaagaaggaagccaggtgcagtggctcacgcctgtaatcccagcactttgggaggccaaggcaggcagatcacctgaggtcgggagtttgagaccagtctggccaacatggtgaaaccccatctctactaaaaatacaaaaattagccgggcctgttggtgggcgcctgtaatcccagctactcaggaggctgaggcagaagaatcgcttgaacccgagaggcagtgattgcagtgagtcaagatcgcgccactgcactctagcctgggtgacagagcaagactccatctcgaaaaaaaaaagtctcaatatggggaaagatccactagaagtaagagccatggcttctacctcgtggcttgtgggtgtgatactcccaacagtccccaaagctggtggtcctcaccgcgtgacagtgagcagagcagctcagagggggtcactgctcacctgggtgcatggctgaccacagccaggctggctctcagtgggatgcccaaggtgctagactctgcttagtctccctcgggccctgggcttgaggcattgggcccggcccagacctcatttcatgcactgagacctttgttccagggcccctcacccctctgaaggtgttcgggcaggggcaatgtgataaggccatgaggggtctgcagcctccagccccactggggaggtggccagtgatttccactttcctggcccctctgcatgcccctcccagtggaacttcctagggtccctgagtcagtcacttgcaaataattatggcgtgcccactctgcattaggcccctctcacaacaacccagtaagggggtgctatttatttattaaagcgattttttttttgagtctcgctctgtcgcccaggctggagtgcggtggcgcaatctcggcttactgcaagctctgcctcccgggttcacaccattctcctgcctcagcctcccaagtagctgggactacaggcgcccaccaccacacccggctaatttttttttgtttgtttgtatttttagtacagacgaggtttcgctgtgtgagccaggatggtctcgatctcctgacctcgtgatccgcccacctcagcctcccaaagtgctgggattacaggcgtgagccaccgtgcccggcaatattaaagcgattttaaggccaaggctggtaactcacgcctgtaatcccagcactttgggaggctgaggcaggaggactgcttgaggccaggagtttgagatcaacctaggcaacatagtgagactccatctctacaaaaaaattagccaggcgtggtggtgcgtacctgtagtcccagctactcaggaggctgagatgggaggatcatttgaacccaggatgtcgaagctgcagtgagctgtgatcacgccactgcactctggcctgggcaacagagcgagacactgtctcaaatttttaaaaagcgattttacaaatgaggtgcagagttcagtcacttgccaaaagtctcacagcgcgtgaggagtagaatcaggactcgaaccgaggcagcctggcttcagagcctacagtgtaaccacagcttagtcccacacctcccagaccaacagggtccctgccttctagtgggcaagacactcagtgaacaaatgtagtgtcaggtattgggggacagcactctcaggaagtgatgtttaagggacagaattgaagggagcagtgtttagaggatgtcgggggtagggccggtgcatgtgcaaaggccttggggtgggaatgtgcttggcacaactgaggaccacaaagccagcgtgcgggagtgcagtcagtggccaggggtgcatagagccttgtgggccccgtggaaggtgccgttggctgtacagctttttttttttttttttttttttttttttgagacagagtctcgcttttgttgcccaggctggagtgcagtggcgtgatctcagctcactgcaacctccgcctcccgggttcaagcgattctcctgcctcagcttcctggtagctgggactacaggcgcccaccaccacacctggctaatttttgtgtttttaatagagacggggtttcaccatgttagccaggctggcctcaaactcctgacctcaagcgatctgtctacctcagcctcccaaagtgctggggttacaggcatgagccactgcgcacaggcagctgtgcatctttgaatgtcataacctgagcatctgagagctgctcctgtcccctggcccctgctcttgaggaagtcccacgctgataggacagacagggtcataagtgctgtgatgggggcctgcaggctgctggagggctcagccgggaccagatgctgcccctctttgtagagtgggacaattgctgcaggcccatgggacctctggtattagccctgagggttgtcactccggggcctgcccctttctgtgttctgacctcccagccccttgcaggccctgcctcccggaaggttatgaccaggcttggactggtccaggcttccctttggctcacatactgcctctgcgaggtcccctccaggaagcctcctgtgcacaacccccagggctgccgcatccctggtagcatctccttggcagctgggtgggctggccctgggcaaggagggctgagcatgctgctggcctgtggggttggagcagcggcgggatgcaacctccctttcttcaggggacctttttggcgaagacaaactgtccataggaagtcgacctctgttcccttgggggcagcagtggaagaggcagctgcttttgagcttgtccctgtccccagagaagcctgaggccttcagtgccgttgccagggccgaggctgaggagcctacagcgtgtgttcaggactgagggccagggacgggccacaggctccctgcctggggtccaagcctagatcgctcgctccccacccgcaccaaagcccaggcaaagggtgcttcagccacttcctgttgcaggctcagaccaagtcccctggcacccacgcggctgcagcctcctcctgtgcgctgcagccacgctggccccaccctctgcagcctccaatcctgagcccctgagggaggatggggaagcagctggtctggccacccctgccctcccttagacctccagagcccccagtgtagccacagaggatgctgttggcttcagccccaagaagacgccgcttcctccagagggctaagtaagtgggaatccccctccctacttgtcctgggctccaggcagggcccctggtgtaaggcctggggctggaagccgacccacctaggtccaggctctggggcagaactgaaactccttggttactgtcggctgcagcctgggagcaggccactgccaaagctgtgggtccttccaggacagtctccccatgaggccggtcctccacctgctgtttcttcacacctggtggccagggatgtggccctgggtagaacgatgattctccactcctgtcattatggaagccaccgctgtctcccagcccagccagccacctgggctgcagagcacccctttcatgccctccgggtgcctcccccttctcctgccccagcctggctttgtcctaccctgctctcagggaggggtaccctggagtggggccagggcatggctctcccccgagggagttcctctctggctgtccccagggcagctctgcacagcctcagtacctggcgcacctcccttgacatccttcttagggacagtcaggcactctgtgtggggcactcaagagagccaggcccgtcagcctctagctcctgccagaatgcaggcctgaggggtgaggggcggggcaggggcagggacaggaactccggcgtgctctccatccgcaaaggttcactgaggccccgagccccagccactgagccaccaagtcagcctgggccaggcctgggtgccctgtctgcaatggaggcagagacggggtctcggggcagttctgaggatgctgggtgcacagcgggggcctcgccggcaggaatcacttatgctctctcctgggccaagctttgtggatgcccagcctggggccgcggggagctggcaggtcagtggcagacactggtgggcagacctagtgtctggtagaacaggcatcaaggaagtggtgaccggagggaagccaagtgcactcaaaccctcgggtgagtcatcaccgccgggtctttcacagctgctgaaagtgagcaacagtgatgaaggtttgtgagtttctgcgtgagcgagtgaatggaccagtagcagtttccaggttgtggaagagcgttccctccccgggatggggacacttggttacagcaattcctaatcccccacccacccaccgcccactgcagaggtatgcgggggccctgcttcctgcaggcaggagtgaggggcactcctgtgatgtggcacccctgtgaccgaggtcatgtgtgatcggtgtaagggcaggaagcgagtcattggtctgcaccaggcgtgggggcttctgcgagggcaggacccaaagtcggcctggcctcccggctgcagcactcctttccctttcgaattaggttagagccctgggacgggaggtgccctgtagaccacccccctcaccaacttccgtcctccgccccacccccgcggtgatccggtgaactgccggccccctgctgtgcaccgagtggggcagtgaccctgacgtggcgtctcctgccgcccctgccaccgccaccacctccggtggcccagcctccgcatt

SEQ ID NO: 31 - DNA, 13705 bp, Homo Sapiens
gacgggaaagggagggcgagggctgggggcggggaccgcatgaaatggaggcgcccgatcgcgaagggggccctccccgcgcggccacggggaggagcctggggaggccagcgtgggtggcagctccagggaggctgagagcaccgctaggcctggggctgtgacgctgggcggacccggcagggtctggaactcccttctggctggtctgggttggggtggtgggaggggagaggtcggaccgcttccctgcagcccttttccactgagccaagaggggcctcgagggaggacggaggcagggaaggaacagccctggcctcatccagctcacccgcagataccccacccatatatagatctgaagtcacgtaacacacctcgattctgacatacaccccaacaaaccagacgcaccagttcacggtcaccccaactcgcagacactacccattcagatggacacttcaaaacttagaatctttagctcacaaagatacaccccctactcagaggcatatggcatacctcagacacggccaattcgaagatgtaaaccccaccacacataaacatccagcctacaccccaactcaaacacacactctgaatcgtaagccctaaagcacaaacacaccaagccatacaaacccttgattcacgacgcccgggcacacagatgcaactcaactcaagcaacaccccagctcaccatggacgttccctctcagatataccccaaactcagaagcccagcaccccaagctcacagaaacgccctaggacaatcctgtgctgttacatgtatgtagtggagcagagacacctttgtcctagcctgggggtttcttcaagtgagtccaggcctctctagataaactaccaccagatcagggagaggagtgaacccactggatgagccactcccttctcctaccggcaccagcccctacgtatctgagccctcggttgcgggccatggagctggcgcctgggaacgggacctgctcacagggagccagaaagcagtttctagctccagctttgcgctaactcgctgccagaccttggaaaagcttagtccctctcaggcccctctccctccgggttcctgcagcgcagcagcaccgggaaggtctttttggctgtccacgcggcgggggagcagtgtggagtgtacccccatccaatccctgtcccgtgcagggacccccgcaactcccgccttccaccccagcgcacactggaggaggggaactgaaggcaaacgcaggggccggggccgcctgctcgcgttttccagagccgggtcccctcccccgccgtgcgcagtcgcgaccgcacgcatgtgcgcatgttccgggagagcctgcgcgtggggcctggggagggggcggtccccaggctgagtcacgagagcccgggcttccgtggcaggagccgggggtcggcaagccccagccctgccctccctccgactctggactccgtcgccgactgggtcctccatccttcccctccagcgacttctaccctgccccgccccccaccttgagcagctccctagggaagtcgccgccatcattgaggccctccaggttcccgatgaagtccccgcaggtcatgcgcttcccgatgttctaaggaagggaacggaggcctgtgagtttggagggcccttggcctcccaggtcctgcatgtctggccaggggtttgttttccggctcctgcccgcccgcctccactcacatggccgtggagatccgtgttgagcagcatgagcgcacaggtcagcgtgtgggcgccgtctaggggagagctgactttcagccttggctgcctcccagggacccttcccacagccatcttccccaacctcccatttcatccccaccccctttggccggcaacttcctacctcctgaaccccgctagtaaaccctccccacaaagagctcctcttccagcagatccgtcagcaaggacccgtccctggctccctcaagtactgagggctagttgccccaacgtactagttgccccaacgttcccttgcctctaagcctggaccacgagaaagtgaaccgcagcacagtcctgtagaccagtgcagccaaacagaatcccctctccagccaagcactggcctgcacaggcatgcaaactcctgcctcttcacaacacactcaaccctagcaatatgcctgcccacatgtatagttccacatacatgcagccatgacagcgctgtctgcacacatgcaagttcacatgcctacacgcatgtacatccattccctgctgtacacacactcatgctcctgtacacacacacagggcccagcccattttgccactgtggccagctaaggacacccctgctctcggaactcctcaccctctgaggacagggcttcaggattgcactggaagtatcgctgggagaagtgggccagcacgcgctctcgttcctgggtctcacccattaaggccagctccttcagaaacaccctggagaaggggcaagagagggttgcctagcaaccaggagtttccagcctctgtctctggggtgacaggaggctttgagagtacagcagctggggtgggaaggggaggagagaaaggggatgagggtatgcaccctgaccctccacccatcacccctacccaaggtccctttaccaggcagctctggcccttggccatgcccagccatcttgggaagggtgatgtcaggacggcttgtgggggacagaggggctcaaaggaggcatcctggggccctaacacgaaccccggagagtgggggctgtcctccaaggggtcaacacccacctgagagcttggtccagagtcatgcccgtgaagacaaagaacttgaggtactccccagccaccagtttgctgaagtcattgctgtgggcagggcagagagacaggtagggtctcaaggggaagtgcagggggtcaggtggggattacccaatgaccaggggacattagatggagagctgccttcaggatgcattccctctgcccccatcctcagtcccagcctagtggctttacttcttgcccaggtgccgggccacatcggccttcctgaagccatctagtcggtacagcctcttggccaggcgctgcgcagcctccaggtccgctttctgcccattggacaaggtgtctgtgcttcccagggccagccgctctgtgctgtccagctctgagtctgagtcggacaccagctggctcaggggtggttcgctgccggggtagaacaccagctcaggctggggcagggtccttaggagccatccagaccctccttctgcctccaggcccagaagatggagaaggggagggagtggagggacatggggaaagcattcttcttttttccagggaaggagattagattctctccatcagcctactccatcattaccacctctctgtggaagtcctgcctcaaatctaacccacatccgtcttgctgctgtgggagttctggctgcttcctcaagctcccaggggcctacatttgctattagacatagattatctgttcccaccctggccctacacagaacatagtcctttgtctcttagactatggacaaagctggaatagatgggctaccacggaggaactgtggagggccagggaaagatttgagggcagcagggatactggtccgaaggctttccccctcctgctttttagggagaggaacctctccttggtgctccccctctgcccacacagaagcaggctctggagttagggggttaagggtcggggtgcataccctcattccctttctttcctccccttcccaccccagctgctctactcgcaaagccacctgtcagcccagagacagaggccggaaactcctggttgctaggcaacccggtctccctggccaccccctcctgttgccatggcttccatgactgagagggtagctggcagaggggagagcagaaaggttagactgtgaaaggacttcctggagctggacgagagatgcctgattaggcaggggtgacatgggagggaggcagtgggagaggctggtggctgcatctttggtgaagccttcaggctgggtgagggtaaggtcacaagaattctgagcaggctaaagactctgccaagggaagaaagggccctccaggagagcaagaagggtattctcctgggatccttcaatgctgaatcatgctttctcaagccactggacttgagaccaagaggggtgctgtgagggactctccctcacagctaatggcagtagtcctccaaataggaaaacaggatctgcatcccttaaccacccctactcaggggtcaggaatataaaccaatcctcacactcaggatctgtcccttacagcagctgtttctggagccctgggggcctcaagtctgagggacaaaaggaattacttacctgccaaggggtgctgcccccagcccaaggctgtcctctgagtggcagggactagggggctccctccctggggccagcttggctctggcctctgcctcctcctcctcccctctctgtgtccaaggaccatcagcagcagagctggtaccagaatccggttcaagaggggcaagtggggcgggagctggtgggtcgggccggggtgcagggggttggggaggcagctcaaaggtgaagaaggggctctgggttgggccaggtgaggccaaggcctccagcgaggcgaggctggtataggaggtgcctttggcccggtgtgactccaggatggcttcgaacacacaactgaaagagtcaggcccatcagccgaggggctcgtcccaggtagaaagggcacaggtgacttgagaggcatccggctccctggcctgcaggggcagggagaatctctgattaggggcccagatcacagggctggggcaggatttcactgaactctcacactgactctgctaaggggattatcatccccttttcactggctccagcccactaacaaaaaagagcctctagggtagggcgccaagctattcagtgccccctggggcacaccagccctaccagtccccagcaccccatcccctccctccctgctaatctccctttctcctccttttccgtgatccgcttcccttctgccatcccatttctatttctagcaacatcttaggagaagatgaggctccaagcgacactggggtgtgagacggaaaggaatgtccccacactccccactctcccaccaggatccaggatccagactcatgctcctgtgttcctgggcttgactgtggcctctggcctctcaccctgccccctgttctgctagaacccctggcctctttgctccccacatccccagtgttctgccaagcctcaggcctctgtctagaatctcctgctatacacactgccccgccagccccacacccatctctatcccaggccctttgagcccggctctgcctgtgggccagtgcgaaggagcaagccgcttccctctcccacttccccctcccacttccccactcaccgggccccttcagaggcctcaaacacctcgtcgtccacatcttcttccccacctgcctcatcgtcgtcctcatcctcattgccactgccgaggctgggatgagggccagggagtgggccgggccgtggggcaggtgggtaggcagtgcctggtgggccctcagagctgggctgactttcgatggccgagtcggcctcctcccgctcagccagcacctcatcgatgtcagtctcgcggtagcacctcaggggcaccgtgtccaggtctgtctcggagtacttggctgctcgccccacagccaccccagagccctgccttgagcccaccccaggtggagatgggggggcctgctctgggggcttagcacctgtagtgtgcataggcatccaggtcaggaggttatccacgtcagctccctgtcctaattctgctctaggatctctgcccactgcctcatattgacaggaagttctttcactgtctagccaccattcctcctgctacatacttagcttgttcctggtgccagtggagctcattttaaatcaagttcttgtcaaatggctttgaggagctgggggaagaccagcctttttctgtcttttttatttatttatttatttattttgagacagggtctcactgtgtcactgaggctgaagtgcagtggtgcaatcataactcactgcagccttgactgcctggactcaagggatcctcccacccaacctccccagtagctaggactataggtgcacaccactacatccagctaattaaatttttggtagagacttgcttgttgtccaggctggtcttggactcctggctttgagcagtcctcctgccttggcctcccaaaatactggggccactgagccctgctgagcctcttttctactccatggaatgcccctcaatatccttctgtcccctccctccattactcagcttcctccaggtgccctgcccagtcctatcctccagcctcccatcatagcgcagatggaaagattgaggcctggggagacattggctgactcaagagccaattccaaggattgggggaagtttgaaggagggctccctactgagcctcagctgctgtggggaaggccctgccctgttctccctgcctcagtcccaggccttacctgagctgggggggtccaaggagccatagaagaattcccatttggctctagcgattctctgggcatgagaggagacttcccggggggaggaccaggtatccccctgagccaacgagggagacacaggcacccagagataaagccagacatacaaggacacaagaatatgggacagaaacagaaattaaaacatgcatcgacagagatggaggttcagagacacagagacaaacacagagggcaagagagaggcagatttagaacagattaaaggattcagagtgaacagcagacaagcccatgtctgacaggaggctgagccttgccccttcactgggggcccagggagcccaggggaagttgcatacctggttcaggaatccagtgtcagcaggtcctccgaagagtgtggccaggcgctcaggggggccccccagcccattggggagagaggagtaaaggccatctgctccaacctggggtggggctggcggcccatgtacaaggttccggctgccaggtagggccgagcctcctctggcggggagtgggtctgatgtggatgcttccagccgtaacttccggttggagccaggcccaagggctggggtgggcctgggaggagaaaccccacccagatcccagctccgactcaagccccctggagcaggtagcccattcagtggcctcacactggccttctccacaaagcggaagatgaccacagagctctgggccccgggtgggggctgcccagtgggtgaagagggtgcccagggtgagggagcaacacggggtgagggggggccacgcagaggtgtacagggtgctgtcacacgtcccagttcccggcctcgaggacctggacctgccactcgccgtagcaaggagcctgtgctgccatacatgctggctggggggctctggggcaccgggccttcggggagccagcggcgtgggcatcgtggtggggagatggcacagtcgccttccgagcagaagcgcatggcaccctgggccatgctggggccgggggtcaggctgggggggcagggatggcgaggccaggcggggagtaagggggctgcatgctcttcagacaggcctgtaagagaggaaggggagcatggggtgaactgccaaggagttagatggataggacagcagagatagggaagggaaagttggctagggcctctgagtatcagggacctagcacaccctggtaatatgggatcattgatcccacgcctggggactacttccatagaggcctgacgagaaaagacttatacacccagtgggcccctggctcctttccttctgcctgaggccctgagcatcaccctgggaggagagaggaagcaacttcaaagttgagtgagcccggagttcttatggcactttggagctacttctagaataggggaagttggtaccccaccctctggaaaaggggtgtcagccagctgtcaccatcatacagccctgtgacccctatagtctctcttatggaggcccctcactcagggaagggaaactcaggcctcctggaaggagagggaagaggaacaggtgttatatagggatgctgaagggctgagaggcacagcatggaagtggggagaaaagcctgagcagaggctcctacccccaatatatacatactgagtgggaaagggacattcttcttttttttttttttttttgagatggagtttcgcccctgctgcccaggctggagtggaatggcgctatctcagctcactgcaacctccgcctcccaagttcaagtgattctcctgcctcagactcctgaatagcttggattacaggcgctcagcactatgcctggctaatttttgtatttttagtagagatggagtttcaccatgttgtccaggctagtttcaaactcctgacctcaggggatccacccactttggcctcccaaagtgttgggattacaggcgtgagccaccgcacccggccagggacattcttttcttcatacaggtacagacaggcacctacacacacacaaacacacacacacacacacacacacacacacgcacacacatacataaggacaaatatgtcagtacacagttaaacacattcataggcaacaccctctggcacacacacagacacacacacacacacactgctcaaagacacaccctcatgcactctcacagtcataacaagtatgtgtgtaatgaaaaggcacatgcttgttttacacacacaccatcatcaaacaggaacacacaaagaggtacccaaatatatacacaagctgtcattctccagtgcacacagaggtccaggtgtatcagacactcacagagacctactgctcacagtcacatacacatacagatgtacacatacagatgtacacactcaagcagggacacacaccgtcccctcccccccacctactggggtctcttgaggggaatctgcacccatattcctctcctctccctctctccccaggggtaagacagatcccgcccaggagagaccataaccaggtaaaggggcctctggtggcaatgcaggggaggggcagaggtcaggagtagcaaccctgccaggcaggttccggaagctcaacggggtcccagcgcatacccggtgcagccccaactcaatgccacctcagtactcaccgctgctcgcccagagctgagaccgaggagagacagaggagaggctgggcccagctgagctgtgaaggcagcgcggctcccgtttgctccaggcccgcccgcctctcagtccctccccctaccccctacgcgccgctcaggcaacgctaatcccccccaccccccgccctctcccagggcccagagccccggaggctgccagccccccttgtcgctaggtccccgctgggctctcccgccaacctaagacccgccccagacaaggaggagggcgcatggaacccctggttctattccccagaccctcacgtgccccaccccacttgtgtccacgtctctctcgcccaccgccccttgagccacacgtaaggcccggctgcacacgcgtgtcccgctccagaccccacgcgtgtccctaggaggctgccacatgacctgttacatgccacacgcgctcccgcccccacgagcacgcggccgcgccaagcacacggtatgggtgtagactggacccgccccctaaatccaggagaccatcaactatggaaaggagatctagggaacaccgtcttgaacccgccaggggttttgagtctcggacccaggagatccaaccctgaccaccctcccaggatgcagcagggggatgttaaatcagacttcaggaagaacttccttgctgcctgagttaggtgtcgtcacgcctgcccaggggtaagaggttagacgggatgaactagggaccggaagacgtgggggaccggcaacccttgtgcccttggccagggtagaagggggccctgctattttaagaaagagccgctggagttactatggcaactactctctttgggagggccagggcgggcagatggtgacctcggaaggaagaaggggtctgttcgggcagtcagggggcgcgaggacgtgcgaggcgggggcgcgcggggctcaccgcggggaggggcggcgcggactccgcgtggtgctgaaggggacagcgccagatttgtcgcactgcgcaggcgcagaggcgcgaacaaagaggggagggggacgaggcgcgcggccggaggtggtgcgcgctcacgtggctctatctttgcaggggtctgtcctcccagctaccccctccctaagcaggctgaggaagaagagatagcaagccctcacctaacttgacccctttcttgtctctccccgctgctagcttctcccttctcgctgccttgcggggtggggaaacgtggaaggaattctgggaaaaccagatgtctgggttctctattcccgtctggcttgattctggacaaggggcttcctctccagggcctcggtttccccatctttaaaatggactgatagcatagacctgcccacctttcagaggtgcccgaagccttgacgagataacagatgagaagtggttttcgttgtgatgagccagctgaagcggttgcaccggagcgccagaccgtcagcggtgcagtggctctcgcgtccttcacatccccccacacccatcccgtggatgatgggggaaggcactactcctggggttccccgaagcggatcctgggactgggacctggggacgcggtgagaggcagccctgaagctgagtccagaggtctggggcgtcattgtcccagggcggacccagccccagaccctacaactaaacccaaggccagccgagaagcactaccactggcgggctgagctgagctctcattcttcttaggactctggacctttggaggaaatgaaagggacccagttggaaatatagtctttcttcgcgccccctacatctctctcccccggcggaaacgcggcccaaactgttacgaagtggaagaggctggatagctcttcataattaatcaggaatgggaggtttgagcaggtttacttgatgagggaaacattatagcctcgccaattcattcattatttcaacaattacttattgaacacctgctacgtggcagacagtaagagcctggatagtttctccccgtttttcaaagtcgctaaacgcgaccagagggcagaggagaggccggtaacctaagagtcctggctccgccccctccgcgtttggccttgcctgctcctcccaccaccacttcgctcagaggcggctactggctcaagaggacgacagaagccagtctctgatgcccaccgcattctccagcttcaggcctcaagccctgtagccgagaaggcgaggcctaatgttacaccaccggtctgttccgcctccgtttcggggtccacccgaaaagctttcagatcggatcctcggtgagacggcactcgattaaataggtctgtctctacaggccaaggaggcgggtttggtgcggccactccaaggccaaagcgagaaaatcttactgcgcacgcgcaatagacagccgatggagccaccgatggagccgtccggaggggagcaagagcccggagccgtcaggtaccgagcaccggaggggccgagagggaagaggaacctgagggaggggagccgagccggggctgggtctgggggccgctcttgggagctggggcgcaggaacataacggaggcggactcgcaggtaatagtggccccgggacgccagtgccaacgcccctttactcgcaggttcctggacctgccctgggaagacgtgctgctcccacacgtcctgaaccgggtcccgctgcgccagctgctccggctgcagcgcgttagccgggccttccggtcgctggtgcagcttcacctggccgggctgcgtcgcttcgatgccgcgcaggtgagccgggggctgaagccccgcccctgcctgggtaccgccccgcctctagcccagcccccagccccgcagtatgcccttctggacccccttgggccgccggggctgcccggaagggatccacgcaccaaagggcaaatactcggtagcgactcagagggaaagtggggtctctcctgggagagcaggaggctgccagaaaagaactcaggtcaggggtgcataggcggctgaggagtgcgggacgggctgagagttggggtgcctccccgcccgcaggtgggtccgcagatcccgcgggccgcattggcccggctgctgcgggatgccgaggggctgcaggagctggcactggcgccgtgtcacgaatggctgtcagacgaggacctggtgccggtgctggcgcggaatccgcagctgcggagtgtggcgttgggcggctgcgggcaactgagtcgccgggcgcttggggctttggccgagggctgcccacgcctgcagcgcctgtcgctcgcgcactgtgactgggtggacgggctggcgctgcgcggcctcgctgatcgctgcccggccctggaggagctggatctcaccgcctgccgccagctcaaggacgaggccatcgtgtacctggcgcagaggcgcggcgctggtctccgcagcctctctctggccgtcaacgccaacgtgggggacgccgcggttcaagagttggctcggaactgcccagaactccaccaccttgacctcaccggctgcctccgcgtcggaagcgacggtgtcaggtgcctgggcctgatagggcgggaggagggcagtcacttagcctctgctggtatggggcgggctgtagttgttaaaaggccggactgagggttctgaatcttcctgcaaaccacagcacccccattctgaacagaaagggcctctaggattgcctaggccagagagcccatagtttaaaaacttttttcaaccaatgtttacacattgggagatttcacatagaaagtcgacttctggcttttcttcaacaagggggagatcttgcaatcctaggcggagctgagggccaggttccccccttaaatgagacaggaagtctccagctcactggaagccaatccaggcgcctcccttgtgtagggacggaaaaagtatgcccctgccccgagctggagggagaccgggattttgccggagccagtccgaggctgagtgagcccgggcctccaccttaccccaccaaaggtgtggtggcctcatgtccctagcctcaccctgctcctccctcaggacattggccgagtactgccccgtgctgcgttcgctgcgggtgcggcactgccaccatgtggcggagtccagcctgagccgcttgcggaagcgcggcgtggacatcgacgtggagccgccgctgcaccaggccctggtgctgctgcaggatatggcgggcttcgcaccttttgtcaacctgcaggtctgacccgcctgccaatcggagc

SEQ ID NO: 32 - DNA, 3574 bp, Homo Sapiens
cacaccgcccctcccggtgagtcactctatttcaagcatcctcccccatcacatgatcctgttttatttcttcattgcactaagaatacctgaaatgtatatgcctacatttatatagtctatttccccctgagaacggaagcttcatagaaggtgaaacaaatcttgttagttgctgccagtcgcacagtaagccctctgtagaaaatgtttattggccacatttttttaaaaagcgaataaacctcaagattaagacctcaaaccaaactattccagtttccaattgcttacagcgacatactgagaaatcgagtgactctcaagagaaaggccattttgaggctggggtcgaaccaaaatccagggggtccacaccaggtcagtaccccggaattggctgttttgcaagatttcgggagtaccaaattggcatgagacatttgacaacgaggccagccatgcaccgagctcaggttttatttccgttgtccttctgacgtcagaaaaagcacgagttgctgcacagtttcttttatcaaggtgacaaattacaccctcgctgggccctgcattctgcaaaccataaatttattttcctcctcccccttatattgaaaaatgtaaaaacccactgcagagaggtcaaaaccccttccaaacgcaaataaataccgttttctagcagaggcgtcttttttcacttttgctacacacatcaccgcggattcgtccgagaaagtacgtgatcctggcggcagttaggtttctaacagagaacgagggtttgtacaaaccccgggtccgcgccgcagagcaagacaaaggactctgaattgtagcaccaccttccccagcccaaggcagcctgtgaaaggcactgggagcggcgtgacgcgggtaccgcgaaattccttttgctgccatatgcacttgtgccttctctaactacagttcagcacaaacctcaggcgggcgatttggcaggcaaacggtgcccaggcagccgggtaacctactgggtcccagtgggtgctggggagccccatgcgccaggaggtggataatttagggggcaaggggctcgcacaagggcgaagatgcgctctcctcccggcaccgacccacgcgtttaaaggcctctgcggcaacgtttagggacgcgaactaggtgccgggggttggggaggaggtgggactggaagcgagagcagtctgcgcccaagaccgcgcaagaggtggccttttgttcgctggctccagcacatcccggctctcgaaaaaacactacctctgtcccctgccaccctctgcattttagaaaatcctcttcagggcaggaaaggacagtgagtcactgcaagcatcctttagtaatttctccccgcgccctcctacttccccgcgttacagaggggcagagcaccaggaaggacggcaaacatgccccggtttagtggtggtccgcggccgctacccagccggccgcacgcagcaccccccggacatcacacgatctcctctgggccttgcggacacaggaaattttcaccaaaggccggggattcaaacactcccagaacacggtcgcgccctcgggtcagctgcgctctccctccagacgtgcgtggttcctggctctcgtaaaaatggaaccagatctggtaccacactctgccacagccacaggaaaacacaccaaagtcacaggaaaacaaaccaaaaagtaagccacagcccacgcaaaggtgaactcgggggccctggcgcttcctcccgctgccgcgtgcgttcgggaagcacaggagacctggacttttcctctcctaaaagcaacatccgaaagcatcgggcacagccgagctctctctgctttcacgcccgcagagatgatttctacgttacctcctcctccgacatctaaatctccccttgccgctcgcccagccctccccgggaacggataatcaccttacctccggaaataaagggaaaggtggcaaaaggcgatgtggaggtgtccgcccttccggggtttttaccctcggcagtttgatgtcctttgtgtcaaggtctggctgcggaggccgggaaaatgtggcccccgtcagtaagggttgggcagggagcttggcgtggcctggcggatttcggaggaaggtgaagggcggaggctcctggcgaccttctggcggagtggcgtggccgccccagtccgcgctcgcctggctctcctcctttccgggccgattgcatcagaatctcccctcaccaccaacccccactcacactctgctcgccggcctcgcacttacatcgacatgcaccggcgctgagggtcacgaatcggagtcattctcctactgggggacgcgtggcccttccgcaaccatggcttgtgatggtttaacgcggacaggccattcctccccgtcccgcgcgcggtctcctcccctcctgtgcgcccgctctttaaccaaagctgcgtgtcagtgagccgtgccggtcacatggtgtcactgctggcggccgcaccttgctgcctccctcttgcagctctctgacgatgcagcgaccgcggctggcggagattgagcaacggggaaagggtgagggaggggttgcggggcgcgcgtgtgcccggcgcactgaagctggcaccgggagcagaggctgcgcgccgccctggcacctgcccctctccctcccggggcccggcggcgtgttcggaacccagctgcggctgcagctggagaatgagagcccttagggatgggggtggggcggctaaaggggcaccggcggaggacaggagggctgtgcgttccgctggggcctgcattttgggtacgccagagccccgccggggccgaaggagcgagggagttgcattgtgggaagggcgcagcatgaggatggccgcgggagtggcaggtccgagcgcagcccggagagccgcgggcagcgcctgggactacgggcagcgttggagcggagggctggccctgggcacagcctgcagatggcccgggttggcgggaaggggaccgaagtggcaggggcggcggggagctcgggcacctttaaaaaccctttgtccctaacctgaagcgggaggcacctcccctcttccggatccagcacccgcagacctggtcagcccttcctgagatctgccctgtggagctctgctttggggactgggtgtgaggtgaaccagaaggatttgctgagcaccgagaaagcaccggcctaggcgcaaagagccgggggccagctcttggagggcctggagaccccacgtggtcccgaccgaaggacctggtgcgtccaggttaacggagctggggcgctccaagtccgggggacgagggagcggcatggaggggagcaggggcaactgggcctggttcccttttttcccgcttactctttgtttcagacacagccccctttcactggctgggcacttgcttgcagaggagttgtgtcttaaaatggcgacaggaaatcccacctgcgcctcagccaattagactgtcatagcgcgaatttgcagggtggaaacgcgagc

SEQ ID NO: 33 - DNA, 3506 bp, Homo Sapiens
cagcggtaaagctctgcccacgttaagtaacaaaggataagttagtctttgttgtgatcactttgttgtactgataagctacgtatttctactcaaggattcaaattctcacctttctcaagaattgggccaaaaccgataaactaaacttatttacggtccactgattaaaggttgttgcataataagttcttgctatgttcagcagttggattcacagcgccagaaacctataactgcttgactttcctccccactacactgcgaaaattgccccttaaatgtaactaaccctaaaacctcaacagtatcgtggccaggcgtggtggctcactactgtaataccaacattaggcataggcgaggggattgaggccaggatatcgaaactagcctgggaaacacacggagacccggtctttggaaaaataattagccttgcgtggtggtgggcgcgaggttccggctaatcgggaggctacagtgagccatgatgacactgcactacagtctgcgcgacggcccatgtcagtaagctctggagcacctgaaacaagttgtgttgggtattttatttactggagagcgattagtgactgatgcctacttacagcgactagagacgcatgctccgatagcagcacaaactcagcaggcgcgaacaaatggtaaagagaaactgggcaaacaagcatcacggctcctcagctgagaaagtgggggccctaaaaagggccttttgttgatagaaagggacgctcaaccaccgaaaccgtagagggtgcggccctggcgcttgagcgcgtagaccacatccatggcggtgaccgtcttgcgcttggcgtgctctgtataggtcacggcgtcccggatcacgttctccaggaacaccttcagcaccccgcgagtctcctcgtagatgaggccggagatgcgcttcacgccgccgcggcgagcaaggcgccggatggccggcttggtgatgccctggatattgtcgcgcagtactttacggtggcgcttagcgccgcctttgccaagacccttcccgcctttgccgcggccagacatgacgagcaagaggagtctcacccaacgctttgtgaggactctggcctgaggcagcgcctttatacgacagttggcggaccgaactgagaacctgaaagaagtcggcgggaagtcccgccccggtgggggaggggaaatctaaagggccaaaccgaaatagggggaaaaaaaaagcgagcttcttgtttccgtgttctgaattttgtaacgtgcatagtattttgttaccacgttatgaggctttaaaaaattgcttttgaacgcagaagatatacatcaatactgtgggaaatacaagaaaggacaagaaattaagaaactacaatgttatcccatcacacaggctagttaatcatgtattttgcagagcagttgcacatatttttccaagaaaatgtatacagtgttgtatatggagttttgtaacctccttatattgattataatttaaccaatttctattaaagagataaaagtgatgttttggtgtctatgtttcttaggaattatcaatagttataatcagttccccagcaattttttaatcggctgtattttaaaaataatgttttccacattcaacataaatgtactttttctctatacttgggaccaatattgaaatttatgattttattacaccaaaatttaaattttattacattaatatttaaaattgtattagaggtctcatgatttggtactacgggtctccgcattatttcctttccaaatttcctaatctgtttcaccaaggtttctggacaactttagagaccttttgtgaagtttgaataaaatctcttcgagattttgataattgcattagctttaggacttaattggaatagaattaaaatccttaaaacaagctcttataactagaaaattggtgtttgtaggttttgtgtgtggggtttttttttttttttggaaggagtctcgctctgtcgtcaggccggagggcagtggtgcaatctcggctcactgcaacctccacctcccgggttcaagcgattctcatgcctcaacctccggattagcgcggactacaggcatgcgccaccacgcccagctaattttttgtatttttagtaaagaacaagtttcaccatgttggacaggatgctcttgatctcttgacatcgtgatccgcccgcctcagcctcccaaagtgctgggattacaggcgtgagccgcttcgcttggacgcttgtaggtttttaaaaagacacttttatatgacccaactaaagatttgttatcaaccattatggagcaactttgattccgtatatttgattttctttcttattaataaatacagggttatactctgaatttttttttttttttttttttttgtggagacggagtctcgccctttcgctcaggctggagtgcaatggcccaatcttggctcactgcaacctccacctcccgggttcaagcgattctcccacctcagcctcccctgagtagctgggattacaggcactcaccaccacgcccggctaatttttttgtatctttagtagagacggggtttcaccatgttggccaggctagtctccaactcccgacctcgtgatccatatgcctcggcctcccaatgtgctgggattacaggcttgagccactgcgctcggccactctgaaattattttaacatcaatgaaaattataaaactcctataactattctaatataatctcttagtattcaattctttgtttagaaagtagttaagagttgaaactctggaaatagaaaactttggttttagattaaatgtttacctttcagactcgagctgacttgttaccgatcagacacgaggtgacttgtttattctttttaaatctttgctcatctacaaagttagaataggatagtgacggtactgttggggtgcagaatgattccccaaaatgtggttcttgggcatgctgagcgcttttgaacattgaaaggcctcagaaataagcttcagaatcaaagcccctctaacttcgtcttctttcccatacatgcgaagggactctgacatttcctaatcggaccaagaaaatttcttaccagaagtaacaattgccttctatcccctccctgttatttcattattgcagaaaagaatactgaatatggatttttcaagataatgtctgcctctcggtctcatttaaattaccaagacatactaggtgctgtggctcctcccactaatcccagcactgtgggaggtcgaggcaggtggatcccttgagctcaggagttcgagaccagcctggccaacatggcgaatccctgtctctacaaaatatacaaaaaattagccaggtggtgtcacatgcctgtaatcccagctacttgggaggctgaggcaggagaatcacttgaacctgggaggcggaggttgcagtgagccgagatt

SEQ ID NO: 34 - DNA, 22489 bp, Homo Sapiens
ggccgctgggagacactgtggtcagtggggcggggggctcgggcacttgtccccagatctccggccacctcaagtgacaggaaggggggccagtgaggacatgaacagtggccgcccccaccctcaagggctggcctcactgccccttcatctctgcctggcccagcagctctgggagcagccaccctgcagcccatgcgtgtggggaccctgccgtgccctgagctgtcgaagcagcctcccactgggtgctgtgctgggcccctgtccccatcctgcagggaggaagcacagctgggggagtggccccccgagggcccctgggagctcagatcctacccctggaggcagccctggggaggcccggtggagactctgctcttctgctgaagctgctgctgaagagtgacaggcctgcccagcgccgggggagacccgggactctcagagggagtgcaggacagggcagggcagggcagggccatgattcccggtgacggccaggctgccatgggccgaactgccatctctgggcctgcgggcaggcgctcagctccccaggcctcattttcctcacctaaggaatgggacacgcacaccttcgcccccagggtggtgcagagaacaggacggtgcctccgagcagtgccttcaacgccgtctggggcctgggaatgcaccaggacttgataaataaacaccagctctcaacacctcgccctctgcaaggagaaggccaggaacgtcccgtttagagagaaggcgagtccacgagcagcagacagtcggtgcttaacaggtgctcgctcttcttcagagccttagggtgccagctggccagagtgagcctcgctgaccagggagctgtggcagccggccgggggtcggcccctggggcaggtgggatgcctgtggggccggcgtaggctcaggctttgtctgggagtgccctgccccgagcactggcctggacacctgagctgagcctcagacaggcgtttcggggccgacccggcaggagcagccgctatccccgggcagctgagcccagcagcgagggctggtagaacgatctagacgaaacactgaacttaatagcaaaaccacttctttcgagggaaaacacgatccgcagccagccggcgcgtacacatggggcctggaaaagaagagaattccggagacacaaacggccctacgcgtcgccgcctcggcccggctgctaagttattaaactcctgcacagggaaaagcgataaagtaaacatccacctctcccgtcgctctcagaagtgaaaggttcctgagatgggaaatgcagacggcctgcagagtgctccatccaaataaaatcatcagatgcttgaagaccctgggagaaatgggcccagatgaatcacctgcgcaaagccacttagcacttcgcaggggccccgaagcccggtgtcggcaaggtgtccgtcgctggagcaggggtggctgatggatctggtgcggggtgggcgggaggagtcgcagactcagatgtaggaggtttggtggggccactgattcacgtctggcccggggctctgtccctggggtcgggaggggaccaggctggggaagttggggagggggtttctcccttctctttcccagctgccaggccgtcagtgggagacacaggtcttggggaccaggccctgcaaccccttctgatcccgacgtctgagactggcctggtgctggctctgaggcccctgtgcaacctcagctcgggctggctgcggaggacctttgagggtttcccggcaaggccttctccctctcagctggccatggcacataggaccccactcctccgtatgcccagggcaggcatcgctaatcgagccctgcactccctccaaccctttgcatcagggcccaccaggcccacccacttctgtgcccagaccacctggccgatgggcggccctgccccaggaggaacaggggtcttcctgcttccccagagctcccgctctgggtcctgcatccacgtctcggatgtgccgccctccccacacctgggagccacgccgaccccctctgcgctttcctggggagacacctctctgcaccagagatcggccccccggggtctgggcgtgggggcggggatttggatgttgggggtgcagaggccatggcctcgtcatcttctctgactctgccatgagagcatgaccagggcctgttggccccctgggccctgacgtccccgggcccggcacctccctggaagccctacccattctcctcttttccttttctcacaaggaccctttcaccgtaatcctgcatgacctcatcttagctgattaaatttgcaaaaatggccaggctcggtggctcatgcctgtaatcccagcactttgggaggctgaggcaggcagatcacctgaggtcaggagttcaagaccagcccggccaacatggcgaaaccctgtctctactaaaaatacaaaaaatagccgggcgtggtggcaggcgcctataatcccagctactcaggaggctgaggcaggagaatcagttgaacctgggaggcggaggttgcaatgagctgagataacgccattgcactccagccagggcaacagagtaagactccatctcaataaataaataaataaatttgcaaagatgccatctccgtgtaaggtcacacgctgaggttctgggtggatatgaatctgggggacaccgttcagcccaggacaggaaccaactgtagcagggcagctgtcccgggcacacagtctgactggcacttacccctggcaggtcccccggagcctggcccctccaccatggggcgggggctccagttacttccctgggggagtccctaacctgaggtctcctgtgccggggtctagtcagggtgggggctgcaccccatccctggagcaggtatgctgggccctgatagcaagctggggagggttccagggccagaggaggactcaggggctgaaggcagtgatgggtccagcaggcagcagggagggcagggcaggggaggggtgtcaaggcccataagcgagaggaggcaggagggaggacatggtacccacagctgtggtggaggagggagggtgtccacaaggtgggtccccagtttggagtctcaggcaccctccgctgtggccaccgactgctggggaattgatcagcctcatagcatggcatggagttgggccaggcagggctggatgcccgccaggggcactgcaggtgggctaccaggggctggcctggggttcagctgtcacccagctgacacgggatcaccaatggctgccatggctcaggcatccctctcctgccacgctggggacactgtgacacaggctctcaggtcagtgaggacagtgtgggtgtcggagcctggagggaggggagtggcatcggggaggcccccgccgagcctggacagtggggcaggtggaagggtgtgtgcccggccgtgcactttgggtctggtgagcgtggctgaggggcacagctgctcttggtcggggctgcagtgagtgctcagcccacttggccacaggctggccaccagggacttggcgtctgctacccacaggactgaggactccaacagcagtcccagcccaggccccgaaaagttgagcagagaagggcaggaggcccccgtatccctgggacccatccttggcaggctgggttgggctgtgggggacacacctgctctgggggatgtgggaggggggcgcttccgggcctgcagctgttggccccgaggacagacgcagcctcctcagcaacagctgggccggaggctcgggagccaagagagaccagagcccaggccagcccggcccccaccagggatcagttacctcggctacagatgccagcaggggggactttcagggggtgggcaccaggctggggtgggcagctggggtgggccggggctgcagtgctctcccacccagccttgggcacaggacgagccagcccccacctctgtccactcagcactccgcaggggctgctgtcttgctgagtgcaggacgctgaccccaggatgtcaccatctgatgctgcccaggctctcccctcagaatacctgcttagtgaccacagccaccccagcccctcccactgaccccaggcagagcaaggggccccacctgcacccagcaggtgcagactgggcagggcagggtcccaggagggtgcatgcttggggagcccccgcacgcagacagtggggggccagggaggagccacgtgctgggcacaaggcagtttccgcaggccccttgctgggtctgtctcagcacggagggaccggcagcacacagtaggtgctcagcaaatgccggggggcggggataagcgagcacccacggggggaagcactggctgcggtttcgccacctgccttggcagcacccccacctaggccctggatgggcggcgaccaccgcctctctgctcctggggctctgactcccagcatccggcagccggggacccggcctcccccaaggcctgggagcagccaagtggccaggtatcaagtggcaaactcaggccagggttgggtgacggcttggagggcccctgtggcagctgagccccgctcctcctggtcctgcccaccctcctggtgctgcccaccctcctggcctgcacaccctcctggcctgcacaccctcctggcctgcacaccctcctggcctacccaggctgccactggcccgagggtcccagtgaggatgagccggagatggacactgagggggttgacgggcctggggcaggctggccggggcaggggggctgggcctgtccagcggccgcctgccctcagaagaatgacaccctgctttctcccctgcccgaggaggtggggtgagggtcagaccccagcacccatgtctctgtttttctttctcctgaaaagcctacagactctcatctgaattgctccagcagagcccaggcggggtaccacccccacccacacacacaaagggctgagacagtgcagcctggcgtgtgagcagccctggtgtctccaggctggggtgctgtccgcctgcccacctggccacggtccccaacagccggttcagcaaaggacaggcagaccctacgggccaaggatgcgctggcctggccggtgcggggccaggcgggcagcttgccaggatttggggattttgagccagctgctgcagcaggtgtggccggcccagccaggcaagtcctgctgccgggagggtcgcccaccagctgctggagggtgtggggcggccgggctggccactcgccggcagcaaagccagcagagagtgggtggggctgggggaggcgggagggtcccagtcccacccccagggtccagcttccctgggccctgcagccaggccaggaaggtcagctgggctggttctgggccctaggtcttagcctggaaaccaggggtttcaatcttggcatgagaaagccctcgccacagggcaggaggagccccacatagaacccccaacccctgtcctcgggcctgagcctggcaggactggacgccggacaccggcgctgctgggagccttgagaactgcacgtgtgccccccagtggccagcgccggccgtgctccgcctgattcttcaggccctgatgcggggtcctggggctcagggagccgaggcccggggtgggggctgcacggtggtgtggtcctctcagattgcaggatcagagggcagttctgaaagtctccttggtcagggagctggtttgcagagctgaaggggaggagggggccaggaggttgcttgcggccgtggtcctgaaaatcaggccctgccaagggtctctgagggccagctggggagggaagggcacacagtgtgttcagagcaggaccccagggcgctcgggctcagcgcttctggggacaaagggagatggagcagaggggcctcagggaggcccgccccgtggtggtataagagccactgcgaacaccctgctttggtgaggctgcgccccaggtgttaacagccacaccccagcacaccaggtgcaagccactctccataggccccagcctgttgcaggaaccctaagctccaggccgggaaggaatgggcagggctgccgtagggactgtggtcttgcaggacgagggtttgtcaggggtgctcaggggacagcgggccgggacgtgctggggctgctgtagggactgtggccttgtggggtgagggttggttggggtgctggggctgcttttgggtggccaggccctacctgagagcccggccatgggacccaaggtcagagggtggccgagctgagggttgcctgctttgggggggtccctggccccaaacccatctacctggggggcggcactgaggcaggtccccaagggcagaaaggggagtgacctggtaaaggcagccctgtgttgcccctcctctcccgtccatgccacgcacaccccaatgaaacaagaaattttccttgacccctttgtgggcctggtgacagcggtatcttgcttagcccagagctctcaacccctcgaggcagcaggagcacgcaggtgggcgggtgcaggagctggagtgaacacttctgggcacagcaggagcagaactccgtgcagtcctgtggcagtgtctagggcagtgcctgtgacccgtgaagcctcagagggtgtgtgttacagtgcttttagctttgctgtccaaggatgtctggagtgtttaacagctcagtggaccctctgccttttctcgagggcagagggtcagtgtgacagctttctgtatcccaagctcttgtccagcatccaggaaatatcaggttgcatgaagaaattgaaggatagtaaatgcaagggattttatggccgatggagggagggggacctggaaaggggggtggagggggaaggtgatggaagaggctctcagagggagggagagctggagagggggtggagggggaaggtgatggaagaggctctcagagggagggggagctggagagggggtggagggggaaggtgatggaagaggctgtcagagggaggggagctggagagggggtggagggggaaggtgatggacgaggctctcacagggagcgggagctggagagggggtggagggggaaggtggtggaagaggctctcagtgggagggggagctggagagggggtggagggggaaggtgatagtcccctgaagtcctgccgtctctaccagactcttctccaaagtcctgctgtccagctgtccctctgaggtcacgctgctcctctctgatgtcaaactgccatctccgatggccagctgcttctcctctccttgcctgctctgttctctgccaataaggtcaggagtttttatgggtacaggatgggggtggggcgaggcagtggtggttttggaaaaggcagcattggagcagggaaactggaatgcgtgttctcactcagggctatgcttccaggcttgagggtggggttcctcaggaaccccatctttttctacctagaatttctgtctcctgtccctatcactgagggcccgtgaggctgacagtacccatccccaaagaaggattggcctgggcagggctgtcaggagcaccagggcagggcctgccaatccagaggtccccgaggaacagattcaggcctgggaacgggcccacggcagggctttcctggaaatgcctggcagagtgggcaggggacgtcattgtgaccccgtattgccggggacaccaggctcagaggggctgactgaccagccaaggccgcacaacagagctgctgggagcgggtccctgccaggccgtgggacacagggaccccggctctcgctgcctctgccccagccccagttcaggacccactgtggctgtcactgagctccagcctcagagccgcccaccaagcccgacctcacgcagggcccactgtgcccaccagagggcgccagaagccggcggtcccgacaccgcggttcaaacgcagggaccgtccggtgggggctgctgcaaccccccccccggcgtgtccaggcccctcctcgagggtccccagggtcggggcctggtcggggagagaaccaggtgtggtggagctggggagtccggcgctgggcagtgggcggcctgtgcctggggaccccggtgtcacccgccaggtggcagggaggctggtcccctccaggagcccccactttctgaggtggccctaagcccctgctgctgtcccttctgccccacgccccatccccctgtttaattcccccgacagggtccgggcagggacgaagcagggtccccccaccctggagctgggaggaggggggtgggggcgtcaccaagcatggggtccaggcagattcagttcatgggggacatgggggtcccagggtgaggacccctggggggctggtcggggggcgctcagagcccacggagagcggcctggtgggggaggccttgccagcagaccctcccttcccccacccggagtcccggctcccatcagcccccacttcctgctcagtgtccggcctctgcctgcccctggtcaatgctgccatttgtctcttcagccaaagatcccatgtccacgtgacatgatcatgacaggagctgtggggggtcccagggaggccggcgctgggcttgaacttgccccgtgaaggccccgagcccccggctgccgcatcctgactgcttcgtgtgaagggaagggagtcacagccacgccacaagagaaggggctgctgcctccccaacccccgccctcccgtctgccccaacctgcctgggaccccccagagtcggctgggggcctcagcccagtcacccaagctgcatcctgccccaggaaacccccacgggccctgaccagtgcccaccagggtccccaggacattctgggggcgggaagtgggggcaggctttatgcctgcatctcatctgcgagcttccggagcctctttgcacacttcacagggctggaggggttttgtgtttcagacggagtctcgctctgttgcccgggctggagtgcagtggtgtgatctcggctcactgcaagctccgcctcccgggttcaagggactctcctgcctcagcctcccaagtagctgggactacaggcacgtgccaccacgcctggctaatttttgtgttttcagtagagatggggtttcaccatgttggtcaggctggtcttgaactcctgacccaagcaatctgcctatctcagcctcccagagtgctgggattacaggcgtgagccaccacaccaggcatgtttttgagacaaggcctcgctctgtcccccacactggagtgcagtggtgccatcacgcctcaaggcaacctcaaactcctgggctcaagtgatcctcccacctcagcctccccagtagctgggactgcaggtgtgtgccaccatgccccacaagttttttaattttttgtagagattggggtctcgctatgttgtccaggctggtctcttgaactcctgacctcaagtgatcctcccaccttggcctcacagaaagtgctgggattacaggcgtgagccactgcgctcagcctagggttagaggtttttttttgttttttttttaatgtgtaggtgtttcctgatgtctcccaccctctttgttgggtctgggtctcgattcatttttccgatgttctgagcagggattggagagtgtcttcaatgtgaaaacactggcctttctgcagcttagtttcagtctcttacctgctactatatggggaggcatcatctgggtgacttcctcagggctgtcttccaactcccatattctcttttggccacatctaatctgctattgaagccatcagctgaggtttttataccaacagccatattcctcgtgttaaaggtcctgtgtggttgtttttctaatctgctgggtccttttcatgctattatattgtttttcatttctacttttatctctttagtcattttaaactcatgtataatcttttttttttttttttgacagattctcactctgtggcccaggctggagtgcagtggcgtgatcttggctcactgcaacctccacctcccaggttcaagccattctcctgcttcagcttcccaagtagctgggattacaggcgcccaccaccatgtcccgctaattttttgtatttttagtagacatggggtttcaccttgttggccaggctggtctcaaactcctgacctcaagtgatctgccctcctcagcctcccaaagtgctaggattacaggcgtgcgccaccacgcctggcctataatctcttaattgttctattattatttctggttcttaagatactattgactgggtgcagtggctcacacccgtaatcttagaactctgggagaccgaggcaggtggactgcttgagcccaggagctggagacagcctaggcaagctggtgagactctttctacaaaaaaacagaaaacgtttattggacttggtggcactgcctatagtcccagctacttgggaggctgaggcaggaggataacttgagcctaggggtccaaggctgcagtgagctatggttgtgccactgtattccagcctgggtgacagagcaagacttcatctctttaaaaaaaaaatggaacattaaaaattagaagatggtgccgtgtctgccagtccctcggggtgtgagctcaccattgcgggccatttcttctatggagcccaagccccagggggacatatccccacggagggtgcatgtttgcctttgctggagcctgggtggcctctaggtcctggaaccagactccatatcccccaccccgcccactggctgccagtggtgccccatccgtgtcctggtgacagaggcagcgccccgggggtacaggcaccggcgtcagctttgagtctgaaccccagcccggccccagtcagctgcatggctgagggtgggtgggggatgcccctgccttgatcccccacatcctcacctatagtgcagcctcacctccctcacaggagtcggagggccacatgggaaaacaggcatggtagacgtaaaaggcccagtggaaatgccggttctccttgctgccattactgcatttatctggcaaccccgcaccacaacccgagacctagaagaccctatgccccaggcggggctgaacaggacagacctcgaagagccggtccccagatcggaccgccaacaaccaggccggattccgcgcctccagccggtcagtgccttggcaaggcaggagcgggtgaaactcccagccctcccagggagcagtcagatgatgacacatccacacccgtccacagggagggagtgcgacaaggcctgtggctttctgcgcgagaatcggccagtgtcctttggggcccgggatggggtttcagcacccactctcactaccggggctcgggagggagggctggagagcctccatctggtgccgtcggtggccactcctcagacagcgcgggcgggttcgcaggccctgggcaaatgtggtgttgccacagccccgccctacagggacagcggtcagcagctgcccctggccccgccgtccctaatgaagttatagatggcagctcttaaatgtctccagaaatggcagagaggctcccagagctgacgtgcaaataaattgcttctcaggctcggaccacacaattctgctgggaccaagcacaggcctgggccctccggctgcccctcagggcctggctctgctgagaggaggaagcctggctcttgggagggggtctcaggtgccccctccatggagcccagcaacctggcaggtgggggtgggcaccgcccctcccccgggactccatctccccggcaatcagctgcctctcccttctctggggccccaggtggtcctcatggaggggtgggtgggactgaggcctgagccccggggaggagctggctggtgagccatgtatcccagtggtcactgcggccagccggggaggttgaatcccaggccccagcactcagaagctggtggagtgggttgaattgagcccctccaaaaacgtatgtcgaagccctgaccccgggtacctgcgagcactggaaatggggtctttgtgaatgatcgagttaagatgaggtcggacggggagggtcccaaaagcaacgaccggcaccttgtaaggaggctgctgacagcagggagaagtcgggcgcgtgacgtcagaggcagagactggagagaggcagcccaggaacaccacgggtggctggcagtgcggagcggtagggccctcccctggaggcttcggagggagtgtggccctgcggacacctcgatctcaggcttgcggccccagggctggaggggtcgcgtttccgtggctttagctcccagttcgtggctctttgttatggcagccccgggagactcacacaggcggtgactgtggacaggacccctgacctccgggccacagtttccccaccggcccctgccacggggtaaataggtctggggtggtgcttaggccggggaactgccccagctgcctgccgtccttgctgtggctgacggggtcgtcccggctgcagctccggccctggctccttgaggcctcgcacccttcctggcacccactggctgggctctcggggcctctggtcaccccgtgggtgctgattgaatcgggacaaacgctgtgtgcagctaaggggtgactcaaggccggccaggcccagagctgatcccaggccgggaacagcagcagtgatggtgtcggcatccaccgtgtccctcccagggcccggccgtgggagccgaggggacgtgtctgtggcctctgtggtctgagtctggaggtcagcgcccagcggtgtggcacctgggcacctctgtcacctgcctgcagccagtgtgtcctcgtggggggcagcgaggtgaccgggtctctgttgggtgcccctggaaggctcagaggcaaggatcttcaggcagagagtttgggggtggccccaggaaacacccgtcattgagggggtgctgtgaagggaaggggtgggtgccaatgggcagtagtgagcaggtcaccgctgtgggcagaccccaggaggcagcaccccggagctgtccctaccatagggaagtggccaggctgtagtggctgtaccccagggcatggactcaccacactcctggccgttcccacgcccaggccaggcctcctgtggtcagagacggccagagtcacaggggttgcaggaagtggccgcaggcatggtcaggggcaggtggcatctgcttcgagggcctgcacgtggcttccctgccccgccagcctctgccatgtgggtcccgggaaattggcgcccaattccatgagcagccctgggctctggggcctcagatcccccaacgctgccgtgtccgtaggaggtgctccggggcctcagatctcccaatgctgtcgtgtccgtgggaggtgctgtgggggcctcggaccccccaacgctgccgtgtccgtgggaggtgctgtgggggcctcagatcccccaacgctgctgtggccatgggaggtgctgtgggcagggctgaccccggggcccagctggttcctccccgcctaatgctagagaagggaagtgctgagtgtttgagggggatcagcaggggaagggggtacagtcaggctcatggggtgaccaggagcagagaccccaccccaccaaagcacacacactggctgcgtctgaggggaaaggagcccagggaggtggatgaggtgggcagggggtgcccgtcgctggcctggacgcctaggggggcatcttactgtctttggggctggcaggctccagaccccctaagctcacggtgccaaacgtgaccccccatactgggcggcagcggctacaactgtgaggggcaggcagtggctgcctggacggggacgtgcttgtcctttgacgaggagtttgcgcctcattcaagtcccctacctgcatccctggcggggcatctgcggtccagcctggcagggaccctgagtttgggtctgtgggggtgtggcctctgggggagggcaaaccccggtgggcactggtcaccggtgagccggcgtcgtggccacagccttcacactcccagccgctgcaggtccccgtttccgtacgtcacccagcgccacgcttctgcacccacgcagagccacgccccacctgtgcgttcatgctgacttattaccgactcttctcgagtgaggagttctcgccaaacgccattaggctttcagcttccagatgaaatgaaatggctgatgaatcactatatttcaacatattaggaaagatggacctatttgcatccgatgagcaaaatgcacttttttattgattgaaaagttgatgaggcaaacaaatcagggaaaatggctcccttttcatttccctctgagcagcaaattaagcgacttaaaagagctttgaatgagtcaacaacaaaatgcccctaaatgtggaaatgtgaagtgcaaacatttcagcctcactgtcagtgcccaccgaggacacagcctgcctcccgccctgggaagctgggggctgtggaggaccccggccacttggacatccagccacatcccaaagtctccaaggggagatggggtccccagcaagcctgtccggattagccaagatgaggggcttcaggagtcaacacagatggagctgccaggcgtggtggctcaagcctgccatcctaacactttgggaggccaaggcgagaggatcacttgagcccaagagttcaaggccagcctgggccacatagggagacctcccccatctctaaaaagatttttaaaaattagccaggtctgatggcacctgtagtcccagctactcgggaggctgaggtgggaggatcgcttgagcccaggcattagaggctccagtgagctatgatcacaccactgcactccagcgacaggtgagaccccgtctaaaaaatatctcacaacaagagagagagagggagggaggagcctgcaccggctgaactatttcagcgtcctggggctgctgtagtgcaggcttacaacatcagaaatttattctctcccagttctggatgccacgagtccaaaatcacggtgtgggcagcacgcagcacactccttccggaggccctggggaggatccctccctcttccagctctgggggctccacgcccctgctgcggccgacgctccagtccctgcctctgtcctcacagggcctgctctgtgcatctgtctctattctgctctgctcttcatggaggaacaccagtgactgacttgggactcagcctcaatccagggtgacctcgtccccagatccttaattacatctgcaaagccctactaccagggaaggttgcattctgaggttctgggcggacatgaattttgggggcaggacactgtccagctcagtgccgggcgccgctgtgggccaggccctttgactcttgcaagcccacgatggctacagagctccaaggaggaggcttcctggaggaggcggcccagctcatcagagaaccagcatgtcttccccttgggttctgggaccagcacttttaacgataagtccttttggaccacgctgatccgggctgagacctgtcgcctgccgcgcgccttgggcggaggttagacaggccgcgcacctccaagctttgacacgtccttcctccaaagggtggaggccccacagggtgagtgcaggttggggatgggccgtggggttgccgggaggggaccagtgggggcttgcagtgttctcgggagggcccggggctgggggcaaccgagacctgcttcggtgggtgagtggagaagcatctggggggtttccttcagcgctggagagaaatgggtgatgaagcctgggaaaggcgtggggggcccgaagcgtgcaccacggtgagaaggctgcgcgtggtcggattccagctcccccgcgtctgcgaaaggctgagctgcgccggccgggggagggtcggaggctgccgggggttgggggatgaagagccgggggcagtttagggcagcgcatcctccgcggaggcaggaacggcaggcggtgcgattcccaccaggacctctgccatcggaaccgcgggtttctgccgggccggaggcgcctgagagatctccgcggaacggcgcgtgaacctgcggccgcggcggcgggtccggatggagatggacgctggatgggctgtttcctgagtttggttcccgtggcggggtcggcccctcgcccctgcatttggcagacctgatgcggagcccgagggtggctgttggcctggggcggggaaggggctctctagatcgggggtcccacctgctgggcttggggagcccatttggccttctctgattggtctggagttgcaggtgaggccacctcaggaagctgctgtatctgagggagcccgggccgccctgggggacgctggggtttgacttctggggctgggggctgcacgggtgggtcggggtctgtctgggttggggtccgcggccgcgtggggtctggattggcgtctgcctggcttgggggtcctcagccgcatgcagtttgggtcgaggtcgggggtccgcggccgcgtggggtctgggtcggggtctgcctggcttgggggtcctcagccgcatgcagttcgggtcgaggtctgcagctgcgtggggtccggctctcatggcccctgtgcctggacttcgctctccaaccatttcctctgcacgtttccctggaaaaggacatggggttcagggtggtggatgtggacaccccctgaaacccaccagccctggtctgtgatgcctggatggaggggccacagccacgccggctcccagcctcttcccagacaccctagcccctggaggcagggtccccccgtgaggcgtatcatccctgagcgccccacacgcctgctcctgggcatcctcctgggtggtggtgtggtgcggctctgcgtccccacccaaacctcacatggaaatggagtctgcagtgtgacggtggggcctggtggggagtgactgggtagcaggggcggatttctcgtgaatggcttggccccgtccctcctggtgctgtcctcgagattgtgagtggccatttaactgtgtcccgcacctgctctgtctttctcgttcccgctcacgccatgtgagacacctgctcccgcttcgccttccaccacggttggaagcttcctggggcctctccagaagcagaaacacctgtgctttccatatagcctacaaagcgtgagccaatcaaactcttttctctataaattacccagtctcagggttttttttgtttgtttgtttgtttgttttggtggaggcgggggtggacagcgtctctctctgtcgcccaggagggagtgcagtggggcgatctcagctcaatgcaccctctgctcctgggttgaagtgattctcctgcctcagcctcctgagtagctgggattacagttatgtgccaccatgcctggctaatttttatacttttagtagagacggggtttcaccatgttggccaggttggtctcgagctcttaacctcatgatccccctacccccaacgccccgccttggcctcccacagtgttgggattacaggcgtgagccaccacgcccggtcgtgggtattttctagcagtgcaaggacagaccaccgcacctggtgaacgcccctgacggcagtaatgaggcacacctgggggtgccccgtggcagacacacctgaaggtggttggggttgccagcgagggaatctgggaggagccaaccggagacccaagtcctctctatgagaaacatctgagccctggcctgtcctgtggaacccgggccatgctggggattgaggtcctctgttttgggttcaacggaggctgcgggtggaggttgttgggggagggtgctaagtgaaaatgctgtagggagggcgtgcttctggcgggggttgtggttttgtggtggtcgtggtttttgttgtggttgcgatttttgcggtggttgtgactgtgggttttgcggtggttgtggtttttgagatggttgtggttttgcagtgggtgtagttctcccaccccacctgctgccgctggaccctctcccctgtgtgtagcccccgctaggaccccatgtctggatcctggctctgggtctcttctctggcctcgtgagactggcgccatctccactggagccaataggcgttcggcacagctacccccagctccctctgtctctggacgagttggtggccgctcccacgcaggaatgccgacagcctttggcatcacacagggtcaggatcctggctgtgacccctcccccagtgacttcctgcgggactgatggccagagagggggcctgtcggccctgcagtgcccctcccaccatcagccacactgagttctgggcaggagtcccctggccttggtcccacccaccccaggaggatccagtgagtccagtctccacctgggacaccgcagaggtcaagcccaccactgtgaggctcagtgggtgccgggagccatggcaactccgcagggatggtcctcggtcccctctccagggaccccaccctagctgtgacctgtcccacggcacctgtaccgtgacaccctccttgctgtccatgtggctatgagggctgccctttgcacgtccattcccgagccccagccctaaagcagtgctgggctcaccaggcccctctgtggacgccgcctctgtctgtgcggtgggatgttaatagtctccgcgtcatgtggctgttaattttggaagctcgcccccttcctcctccccccgctatggtcctgccttcacaccccgctgcctgagtcagcgcccacggctgcaccagatgctaggtttggccccagctgaggggctggtgtcgcgcacgcaggcagggggcctggtaatggggctataccatctgcatgaacggctttgctacttccccctgccctgcccagcacaggctgagtccacagcccagacagcagtgccccgagagctgcctggcacaccccgggaagaggatgaatcttgccgtatggggaggctttggccccgagagctgcctggcacatcccgggaagagggtgaatcttgccgtatggggagcctttggcaggagtggggctgcctggtgaccgcgtgaagcacctcccgggatgaaccagggccctgccaaagctgaggctgggccgggactcctggggcctcattgtctgggatgaggcgggtcccagctgggctgcggcaggggccaggaggtacctgcatctgccctgatctccctcctcacacctgcagagcccctccactcactgaaaagcagggtgtcctgggtgggccccggcctgagcatccagagactcagctccaagccaagccctttaccctctctgagcctcagtttccccatcttcaaatgaagatgcccaaggagagcaggccccgccccccagctggacctatcagagtgcacagaggtgcccaggagagcaggccccgccccccagctggacctatcagagtgcacagaggtgcctaggcgagcaggccccgccccccagctgggcctatcagagtgctgctgcaggcctgaggcctcacctgggtggtacaacctgctggcggaggaaagagctgccgtagcccaggtgggactggggggtccccatgatcccccaggagggtgggggtcttgtgtgggagtctctcaccagctccagacgcggtttccagggcatattcactcaaattcctcatcctcaccttcccccaagtgcaggcccggcagtggcttctacctggggctgggagggggcaggtctttggtgctcatgggacgtcactccacactgggcactggtccaggtgccaggggacagagtgggcaccccagcgggttgtgtgggtgagggcctcagcactgcccccgcctcccatcctgaaggctggagtagcctgggaagctgcattttaatgagcaccccattttaacagagtgcccactgaagctcgagaccacggccaggagggtcagccagggccccaggggcgggactcaggcccctgcagaaggccccatccttgaaaccctttgagggtctccctgtttctgtctggaccccgggccacgctctgcccttggcagctgcagcctgcatctcactccagacgccttggtgggaagcccctgctgccgggtccccaggctggaatccgcaggatgtcagggcaccctgtgctcttggggacgctctgcggtagctccctgaggctctcagacaccaggacaccctcccagcccagtcccagcaacacatgccggcagcgcctgcgccagtgttttcttctcctgtcgggaggctggtgacccgctgtgctgccccggtggggggctgatctctgacctcctgtctggcgggctgtgctgcaccagccagggccgggaggtgcacgtggacccgtgtttattggaatcctgctgtgatcagacccgggggcgacgtcgagacccaccaggccccgtggcctcctgtgaacatctgcaggctgttgggggcagcggtcgacggaacaagtgtggggcggcccgggcttcccggaggaagcgttgcttgagctgccaggggagttacctgcagaaagggaggtggggtgcaccaggcaggggggcagccagggcaaacgcctgatgctcagagggtgacagtgggcagcggggccctttggaggagcggagggagggccctgttggctgcagggcagagtgccccacactcctcctggccgccacccccagggcccagcccagtctggggactaagacgagaggcctctggggtgttccaggtgagctggagtcagcccctgttgcttttgaataattacaggggagtcagcccagtgaccaagcctctgcctggtgggggaggggcacgggctttgtgtccgggagctgctgtcctcagcctcaggagagggggtgtcacgggccgtgggacaggtcacagttagggtggggtccctggagaggggtctgaggaccgtccctgcggagtccatccagccaccatcggttgccatggctactggcagcccctaatcctcacggtgctgggtttgacctctgcagcgtcccaggcgggcatgacctcatttgatcctcctggggtgggtgggactgaggccaggggactcctgcccagaactcagggtggccgatgtggggaggggcactgtggggccgacaggtcccctctctggccatcaggcccccaggagggcccaggtgcttggaggtggggggtgtcccagcttgatgttggggatgtgagtagatccagcgcccacccacccgcagggctgagctcccactgggcgctgggccgtgactcgcacaccggaccctgcacccctggggcacccagtgattccagaacagtgggaccccagaggcttctcagggagccccagaacatgacagatgggggcccaggtgcgaggcagtgggagctggaggaacacagccaggggctgaggcgagaaccatgaggatggtgggcagaggctgaggggaggggcagcagatggagatgggggaggcgttaggggtcacaaagggggttctcagaggatctgccttgggaagccactgctgtgggagggtgggagggatacagcccaggtacctccagagaggatggaaaggcttatggggcggattctgggcaggggacctgggaccagcctgcagcctcccctgagggcctggccatggccgcaggctggggaggaggggaggggaccttggggccaggtgccatggtcctctaagcactcttgctcgatggtaaacataacacgcgctgcttgcagaacatgtggaaacactgaaacgcttaaaggagagaacatggtcccggtacccggccttcaagggagctgctggcgcctgttcaacaggagccgaccccacctgtgaacagacggcaggcggctgctcccatgtcccctcagagaggggccctccgagttctgctgtcacctgggggcgcctcacttcattcagccagtggcggggctccctgggtcggcacagagtcaggggagggggctgggggacctcctggtgggaaaatgtccggtgatccccagcctccgcgctcagcgggaggaggcgctcggtcccgcttcttacaaccagcggcgctcacggcgggcccggggatcagcatcccgggagcttctcaggaatgcagattcccaggccctcactgcctggggagtcg

SEQ ID NO: 35 - DNA, 4419 bp, Homo Sapiens
tgtgccgtgcgggtagggagcagccccttccggtcgtcgaggcgctcttaatttggttggagagacaagtgcactacaagaaacagaggcagccaagcgcctgggccaccatcaagtaaggttgaaaaggggagggcaggtagatcgggacccgtgggcgccaatcaatgctatggtggcggagagtaaaggggacgaacacagcctggggccatccccggagtcccccagcgtccgcctgtggccgtgcctggttggccgcggatcccggcgggcgccgcaaagcggcgggattgccagcgcagagctccggctctctgccttgtccctgggtccgagcaccggagcctctggtgtctgcggggagaagtctcggattgagaaatacgggagggtctcgtcagtggctgcaggtgcggcagccactctggggacccagtgagaatggggtcgcctggctctgcgcgaacccctcacgtgggtgcagctcctgagccgccgagggaggcggtggtaatgtcgcccagtgccagcagagggcagcctcgaggccgtgagcccgaacggcgacctcgccaaaccgcgggctcccttccagctcccggattctgcggggtagaggcggccttggagcccagagaccagcgacctcagtctgcaggagcccggcgcagaggcccaagggcacccccgggatgtggtcaagctacagcccttaggcagcctcactctgcgacggcaagggcttagagggtggagggggaccagatgccttaggaggggttagaaagccaacgcacacagggaatttgttttcaagcaacagattccaagcatgtggaaaccttttaaatgatgctggtgagagctatgatagttttcgcattcttggcgagggaagtcggaggctagtagcgggatggctcctgggcgcgcgggagacagagggaccagcgatccttgctgggggcagagggactgtggaccaaggatccagacacacttaattggggattccagtcccgactgtggccactcaactggcgttgaacttgagcaactcactataccgctctagcctccgactaatcacttctgtaaaatgggcattgtgggctccgagtctcgtaagggcgctagggattcgagacagcaggaatttcctcactgctccagcaaccctgggttcctgggtttgtaggtgggctgaaaggatcctttcatcgcacgtttgcctggcgtggctgctttagagaccgaggcccgccaggctttgcaacccagttgcgcgtggtcagccatggccttggaaccgccgggatcgcctcagcggcactccggccagctcccgacttcccgccctgggcactagggtcacccagctccagaagatagtgcttatcagcacaggaattgagaccccacacccggcgcagtgggtctcccaggaagcctggcgaagagccaaggcccgccggacctgaggtcgcctggggcgctaaacagacccatctatgagcacattcggccaacacacccaagttcaacagtgggcgggatctttggctggcctcgatctctctcacagtgtgtgcaaacgggtacccattagattctttttgcttgtttcctcatctgtaaactttgaaaggagagtatttcccggggtgattctgaaaatcatgccagaactgaaaaggcctgtgtaaatgcgaggtgtaatgatgacttattagaagcagccagccctgtacgtgcctgtaggatagatgctagaacgttctacaaatgtgtgcacatacacatcacgtatgtgtgaaggtgcacacctgtccctagacacttgacaaatgcacacacgtatgcgtgtacctctggctgagagcaaaggggctaatacagggctcatacaggacatcatcctgcagtcttgtgcgtgcacagtacacacgcgagcacgactgtctgtgcctggagacaccgtatggcaccggaggagctgctcagccgtcggtgccacctgggaagtagggtttcgggtgctgctctggagcgcgggaaagtccggatccgggtctgctggtcagcgcttcggcgccgccgggctcctttatctctcatccgccggccggtgagcggctccagtttcaagacccccgatcctgccggtgaggggagggagcgagaaggagtgcgctccgggcccaagaggctgcagggccccactccccaggtctgtcgtccttcctttatctcctcaggtcacacccccacttaaaataaagaagggtgcctgactcattcaggtcagggaagtcggcccccgggagcctcctgccctcacaagccatggtgaagggaggcgaagccagggtttgccacggcctgggagaaaatgcggctgcagggtctctttgggctgcagcgctggcccggggccccaagactgttaaggtgtgtgtgggaggcgcgcagtgtggctaccgaagagccctccatcaccgcaccggcaggccgccgggctcgtcctcctctcatgcttccaagggttctgagctgcgcagcactcgcatcacccagaagtgtctgtggagaaaacgacctcaggtgtaagcccaaggctgctgcctgcaaaggcaatgccgtggagactgggttccacagcgacctgggtttttaagtcaccgaaagctacagggcagggtcacaaacactctcccgccttctctgcagaaccgtgcggctgacaggagagcgttgcgcagaaaattcgaggccgggcgctggaggagtctccgcggcccggagaaggcacagaggcgcccctgagaggcgcagctggaacaggcgatgcacgggttcggatctggccggccaaccgagcccagcggtcgcgaaaaccagagtcgccacagaggttgagcacgattccatttctggggatcgggtccggtggggagccactgtccctaacgcctccagagactttaagtaggacaatataatgctggtaggagcaaggtgcaaggaatttagcggcagaagcctttcgggggggtggggaaaggcagatccgtgcctcgtctgagcctgggggtggggacagcccctggccttgtagcccctgttccggggatcagctgggcccacctaacccccctacatggggttgaaaggggccaatgggacggccccgccgcccctccctcgggattccacagggccctgacccggcctttatctctgcacggtcagcagtcgcgggggcttcaggaaggaggacaaaggcccggtgtcaccgcgggcgggggctcggtttcctggctctctgctcacactcacagcctttagcggttgttgggggaagatttttaaaaatatgtgtcgaatttcctttttttctcttctagaaacaaacaaacaaaaaaggcaaaaggcgaattccccttcactcctcgtccatagagattaaagtttcctgggatcctgccctttttttttctttgactgcctagaaatacttgttctcccttgtacatagaggaaaatgcggggaaaggttttttaaaactcggtttcatactattattattactaaggacaaccgggcaggctgaggtcccaacgtggatgatccgagttggcctcgcgccggggctctgcagccactgccctgtgcgctcagcacctctgggggcgatcagggcccctgcgcttccgcccgccgcccggcagtcgagagcaccctgtgcccagactggccgactcattctcccccgaattttgtttagagctggcaagggggacttagctcgcgccccaagacctgggcttgcagcgccgccaacaggcccggggacacgaggcgctccaggccggggtcttcccggctgctggcccctctcgctccccacccgctggcggcgcctcggtcgcccgcaattgacccaacccgcttcctgcgtttgcccctcaggtttcccgtttctccacaaaggcctaggggagcctcgcccacaggctgaccctgcaacctctggcccggtggctaccttctgcttttctgaaaaagaaaaggaaaaaaaaaaaaaaaaagaaaaaatcaaccagtcgagggaggcgcgtgaggactggaggcgccagccggacagcctatgagtaggtccctgggtcggtgccgcttcgcgggtcagcacggcctttctcagagaaaacctcctaaacgtgtgaagaccgctttgggggaagcgagagggaggttggaggagccccgggcggggtctcagcgcccaccagctgtgccttcagggcttgggtgttcgctgcaacggcaaccgcgtgagcctcactcccacggccaaggggctagggcagggtggatgcaatcgcgtgcgcctggccccggaaggtgctcgcagg

SEQ ID NO: 36 - DNA, 1918 bp, Homo Sapiens
catcggacatgattaccgtacacaatacagaagatactaagggctaagcaatgatgcataaacggggtccactgcccaaacttacagaaagcaaaacgtggaaaattagtaactttaactgatagtgtacacctaaagaacctacaccggccgggcgcggtggctcacgcctgtaatcccagcactttgggaggccgaggcgggaggatcatttgaggtcaagagatcgagaccagcctgaccaacatggtgaaaccccgtccctactgaaaacacaaaaaaattagccaggcgtggtggcacatgcctgtagtttcagctactcgggagggtgaggcaggagaactgcttgaacccaggagacagaggttgcagtgagccgagatcgcgccactgcactcgtctgggagacagagcgagactccgtctcaaaacaaaaaacaaacaaaaagaacccacccaacagaattaagtaccaacataataaatacgaagaattttagattcttggtttttaaaaaacatacaaagatgatattccttcaaaatatctttacaaaacatattgagactgtgatgctttatattgattgtatgaaaacaatgaaaaagaaccagcactgtttcactataaaagctttactaatgtaaatttataaatcctttcttaaatattttgagttaattctaattttatgatagaaattcattattttcagcaaaaacagctggcatttgggaaaccaaaggctcaaaaactaagaatagtaaccaaagaaacttgacaaaacagtccttttaaaactctcatctacactataaggggaaactttgatcacgtcccttctccttcatcaatcgtagaactcaacattaaggactacacaatcccacatccctctccgagaaaaagcaaaggctttgtgttgtagcaacaacgcaagacatggagggaagctccactcaagacttccctgcctgctccttccccaaagccactccagaataccagggagggttgagaggtaaggcatgaagggcgcaatatccaatatgagcaacgcgtgtgatgcatctggtcaaaatgcatacagaggacttgtctctgtccctagatagaagtcctccgtcctgcagtcatgagggtcaattgctgaggcttcacagttcccttctctcttacactcggaccgtcacgctcctcacctactaccccgatgcagaggtagactcaggatccctgcacttgtcaaggattcctcggcaagctcacggggcgggagtggccacaagacggagctcgcctggtcctggccttcccggcctatacaagcctgcccccttcccaattcccaatctccacagccttccatcctcccactttcgattcaccttgcgccaccgacgcccctggccttcgtttgcagcaagtttacccccaccattacctctcgcataaaagcctgcatttaccaggtcaaagaggggaaccaacgcctgcaggaatcgcttcaccgaatcgcctggccgcgtcctctgctagacttcacctgccgctgcggaccgtacacaaccactcccggcatgccccgcgcacgcactacctctcccaccccgcccctctcccgcccaaacacgtgacctcctttcgtctccgtccacgcccacttccgttcctccactttcccttaggaaggaggagggagctgggggtgttaaaagcgtagcgacttcctcctcctccccgcccccgctcctgtacctcccgctacaatgtcttccgggtcgctagcgcctcgacgccttctgggaaaatagctcatttcctcccctccccctcctcctgccttcaaccaaccagccacccgtcagagagggacatgcgcagtgagtgcctcccgtctcttctacccgaacc

SEQ ID NO: 37 - DNA, 13670 bp, Homo Sapiens
agtgctgggattacacgagtgagccactacgcccggcctgggtttttgtttgtttgtttttaagacacggtcttgctctgtctccaggctggagtgcagtggcatgatcacagctcattgtagtcttgacctcacaagctcaagcgatcctcccatctcagcctcctgaggagctaggactacaggcacacgcctccatgcccagcagttaaatttttttttttttttttaagagacaaggggtcttgcaatgtttccaaggctggtctcaaaactcttggtctgccgtgatcctccttcctcggcctcccaaagtgctgggattgaaggcatgaaccaccacgcttgtctctcagcagcttgtgacgccaggaactacatccctattccttgacgctcctccctcctccattgctggggcatcacttttgcctggttcacctcctacctttttttttttttttttttttgagatggagtctagctctgtcatccaggctgtagtgcagtggtgtgatcttggctcactataacctccacctcccgggttcaagcgattctcctgcctcagcctcccgagtagctgggattacaggcgcccaccaccacgcctggctaatatttgtatttttagtagagacggggtttcgctgtgctggacaggcttgtctcaaactcctgacttcgtgttcctcccgcctcggcctcccaaagtgctgggattacaggtgtgagccactgtgcctagactttttttttgagatggagtctccctctctcgcccaggctggagtgcagtggcatgatcttggctcactgcaacctctgcctcccgggttcaagtgattctcctgcctcagcctcccgagtagctgggactacaggcatgtgccaccatgcccggctaattttttgtaattttggtagaggtggggtttcaccatgttagccaggacggtctcgatctcctgaccttgtgatctgcccgcctcggcctcccaaagtgctgggattacaggcgtgagccaccgtgcctggcctcacctcctacctttgtggcctctctcctctgcctgtctctgaggtgttgggggtcctcagggttcagtctccagtcttgttctccattctgctctagggagacttcaccctcgctcccagcttaagagcctctctgccccacaatacaccgatgcttgctgggctatttttgtctttagcccataacatgcttctaagtccctaccccgggatccagcgccgtcagactgaatatatcccaaacctgcctctgtaccttctcagcgtatctgctcctcttccagtgcctggacttgagtctcgttctccactgcctggaccacgcccatcctcctctgaggccttcccgtcctctggtccggccttctcaccatcccccaagtaacattccagacacacggatctgtccgagaccctcccctgctggcatgtgaagccttttatagtctcacgtcttcctagcccaaactttcctcccagtctcacggaaatgctaaatcatcccggcgtgggaggcttctgtgggtcggggcgcagctttgcaaggttcagctccaagactgcttcctccagggagccttccctcccttcccccaggtaagtgctcctccccagttgctcattccaccagggcctgatcacaccctgctggcagtgtcagagcccggctttgtcttccaccacccctcctagaactggtggcagggacagatgaatggatgaatgaatgaatgggaagtgagaattctactactggaccatcaatgcagccctcggaatgagtgagtgagtgagtgagtgagtgagtgagtgatggaaagtggtctggaggcagggagagggacaggccgatcatgcgaggaatcccagcccaagcccccgaggtccccgctcccgccctaaaagatgcacgcgccaagcccttgggccagaaaaaaaaaaaaaaaacgggccgggattggctcaggctgggggaggcgggtctacgacgagacacgattttctattggcttactcgccaggactctgcccaatcgacgcgatcgtcttccccagaagacccccgcctccctcccgccggcggccgcggaggcggaagaaggcgcctttccgtcgccctagcaaccgtcagcggatctccgtcgcccgggcaactgtcccaggcctcccgtcagcctttgcctgggcccctccggtcactcggacaaccgctacccgttccggtcaaccatcaacccgtcccccgtcaccccggcaaccatcgccggacccacctacccctggacgccgtcctggtcctgtccgcaggcctcctcgccccaaacctccgccgcgggctccgacgtccgcgaccccacgtctcaggggctccctcctcctcctgcccgtcttctcgcctccccggggcggggggcattgctcctcccctggcaggggggccccgggttggacccggctctgggggtccctgctcggtcgggacagtgggaccgccctgtgctgtggccgcgcgcagccccccgcaggcttcggcgctcgcactcttgcgtgggactgtccaaccgccacagggagctcttcaaaatgcaagccatgtcccttccctgctgaaaaccctcccctggctccccttgagaatcgaatccaagctcctcgcagcccctggcgatctggctgtgtggcctcttctctgaagcctcctcgctcactctgccttagcaaggccctggcctgcgtgttgtaactccaatgacccaagcttcttcccgcctgggaccttcctagtcactacttcccactccaccaaaaagtgcatcctagacgggcgcggtggctcatgcctggaatcccagcactttgggaggccgaggtgggaggatcacttgagccgaggagtttgagaccactctgggcagcatagtgagacgtctgtctctataaaaaatttttgggaggccgaggcaggcggactgcttgaggtcaggcgttggagatcagcctggccaacatggtgaaaccccgtctctgctaaaattacaaaaattagccaggtgtggtggcgtgtgtctgtaatcctagctactggggaggctgaggcaggagaatcacttgaacccaggaggtggaagttgcagtgagctgagatggcgccactgcactcccgcctgggcaatagagcaagcctccattctcaaaaaaaaaattaaaaattagcctggcatggtggtgtgcccctatagtcccagctactcaggaagctgaagcaggaggattgattgagcccaggaggtagaggctgctgtgagcttacgtcacaccactgcactccagcctgggcaacagagtgagaccctgtctcaaaacaacaacaaataagtgcatcctctagctagggtcccacctgtgagtcttcagtgaagccttccctgagccctgtcagctctctcctccttaaactctttctggctcacactctgtcactaggacctagaacactgcctggtatctatgttgagtaaaaagatgttgtgccaggcgcagtggctcacgcctgtagtcccagcactttgggaggccgaggtgggcggataatgaggtcaggaattcgagaccagcctggccaacatggtgaaaccccatctctactaaaaatacaaaaatgggccaggtgcggtggctcacgcctgtagtcccagcactttgggaggccgagacgggtgaatcatgaggtcaggagatcgagaccatcctggctaacacggtgaaaccctgtctctactaaaaatacaaaaaattagccgggcgtggtggtgggcgcctgtagtcccagctactcgggaggctgaggcaggaaaatggtgtgaacccgggaggcggagcttgcagtgagccgagatcgcaccactgcactccatcctgggacagagcgagactccgtctcaaaaaaaaaaaaaaaaaaaaaaaatacaaaaatgagctgggtgtggtggcggacacctgtaatcccagctgttcaggaggcagagacaggagaatcgcttgagcctgggagggggctgcagtgagccgagatcgcgcaattgcactccagcctgggcgacagagcaagactccatctcacaaacaaacaaacaaaaaaaggatattgtgctggggataagggaggacagagggggatgaccagcaggcaggcctatctcagagacaggagaatgtatttctcagggcctctcagtcctcatggtacaggtgatgatggcaacatccccaaaaagccaggcacaagccagggagatacaagctgatgctacggtcagcctgagactgggtggcgcaccctccacatataaccgccaccccccacccatccccaccccagagggctccagagtcagcggaaactgtggctaatttggagcagaagtttccaggagctggagaggcaggcctcagatcccagatggcttttctgggagctggtcccttcctgcccggaatccagaatctcacttgtcctaacagagacgagagctgttttcccagggatctgagacaggccagcccaggctggggcaagagaacttgacctgaccaggcctggggtcatgacggggggtgagggaaggggcttgtgggagctctcctgggactggctggagaggaatgaggaatctgcacacccacctgcctgctcatgagggtctgcccttggggaggttgccaggggccaggcagggaggccccctgctctttttttttttttttgagatggagtctcgctctgttgccaggctagagtgcagtggcgcgatctcagctcaccgcaagctccacttcccgggttcatgccattctcctgcctcagcctcctgagtagctaggactacaggcgcccaccaccacgcccggctaattttttgtatttttagtagagacagcatttcaccaggttagccaggatggtctcgatctcctgacctcgtgatccgcccacctcagcctcccaaagtgctgggattacaggtttgagccactgtggtcggccctgacccctactcttaagctaggattaccctcatcagcgctgccacacacaactttcttcactgatgcggcaattgagcacttgaaatacagctggtatggccaggcacagtggctcacgcctgtaatcccagcactgtgggaggccaaggtgggcagatcacttgaggtcagcagttcgagaccagcccggccaacatggtgaaaccccatctctactgaaaatactaaaattagtcaggcctggtgacgctcctgtagtcccagctactcgggaagctgaggcacaagaatcgcttgaacccggcaggtggaggttgcagtgagcctagattgcgtccactgcactccatccagcctgggcgacacagcaagactctgtctcaaggggaaaaaaatgaaatacagctggtgggactgagcactgcattttcattgtatttcatttcaattaacatacatttaagctgaagtagccaaatgtggtcagcagtattgtattcagagtagcactgagctgaagacccaggcaggaggtcgaaggcagggacaggaaggtcagggtttaaggtctgtgcagctatggcagagaagcgactttggcaaagcgcagagtgaggccccaggaagggaggaggtgggacactcggtctcggcatctggctccactggaagagaggtatacccagttcccagggtcaaagtgtttgttacacacacatgcatccatgcctgtgtgtgagtataggggttggtgtgtcccgaggcacccataggtgcgcttgtgtgggatccaggagtcccatgcctatgagcgattcaagagttcacccatgtatggacattgtatggactcccaggcacacacagataatgggtgtgtgttccttcctgagtatccatgcctcctgggcaggccagcaaggaccactagtccagcaggtcttgcaagaaggcccacatgtactggtgcatctcctgggggttgctctgtgggatccaatgccctatgcctggcaggatgtgggcctccaagcggcccggcacaaagcggctgccgatggcttccaccagccccagctccaagtaagtgtccttctccccccacagcagcaatgtgggtgtggtcagctcctggggttccagggggaagttcctgtggccaggacagacagacaggcagacagacaggcagaaggatggttgcctcccacccccctgcccctgcaaatctcctgagcttatgcttggcaactggtctcacctgaagaggtttcggtagtagttgaggggcccagtgaggccaccaggctgtgagaagttataaaggaaggcctcgagctcgctgggggtcaagcatgggatgcctgtcttgcggtgggtgagggtggtcttcagaatctaggtacacagcaggactctggcttcagtgcccagcctgcccagccccgacctgcttccctcctcccttcaacctgcaccctctgtacctgaaagtcagacatagacagcagcttctcgggcagccagggcagctggaacaggaacatgtagtgggaacggaagaactggctgatgtggtgcagggaatagtctggggtgggagggttgggggagagatataaggcctgctcctggggtggccccatacacctgcacccctacacatacccaggtcagggacacaagcctcaggaatgccactgctgcctgcctgggtctgtgaaggtactagatacccctcctggcctgggcaccagctacattccctcctgccatgtttcactatccacaggatgggggcatctcctgggaacccccatatccaaaggtgtgcttcctctgcccaggccagggtgcgtttcctctgctttattcagctaacatttattgagcaactactgcatgccaggccttgttctagacacagcagtgaatgagacagtcaaaactccctgttcatcctaggcaacttaaggaaacccctgtatctataatttttttttttttttttttttttttttttttttgagacagagtctcgctctgtcgcccaggctggagtgcagtggtgtgatcttggctcactgcgagctccgcctcccgggttcacgccattctcctgcctcagcctcccggtagctgggactacaggcacccgccaccacgtccggctaattttttttgtatttttagtagagacagggtttcacagtgttagccaggatggtctcgatctccggacctcatgatccacccgcctcagcctcccaaagttctgggattacagacgtgaaccaccgcacccggcctccaaaaaataattttttaaaaattagcagggtgtggtggtgtgtgcctatagtcccagctacttgagaagcagaagtgggaggatcgcttgagcccaggagtctgaggctgcagtgagctgcaattacagcactgcactccagcctggaccacagaacaagactgtctcaaaggaaaaaaaacaaaacacaaaaaaagacacccccaaaagacaaaaaactccctgccctcagggagctgacagtctagatggggagacagacaagtaaacaataataggctgggtgcggtggctcacgcctgtaatcccagcactttgggaagccaaggcgggtggatcacttgagatcaggagttagacactaacctgggcaacatagtgaaaacccgtctccactaaaaatacaaaaattagctgggcgtgttggggcatatctgcagtccccgctactctggaggctgaggaaggagagtcacttgaacccaggaggtagaggttgccaggcagggtggctcactcctgtaatcccagcactttgggaggctgaggccggcagatcgcttgagcccaggagttcaagaccagcctggccaacatgctgaaaccccatttctactaaaaatacaaaataattagccggtcatggtggcacacatctgtagtctcagctactgaggaggctgaggcaagagaatcacttgaacctgagaggcggaggttgccgtgagccgacattgcgccactgcactgcacagagtgagactccatctcaagaaaaaaaaaaaaaaaaggggccaggcgtggtggctcacgcctatactcccagcactttgagaggccaaggtgggcagatcacaaggtcaggagatcaagaccatcttggccaacatggtgaaaccccgtctctactaaaatacaaaaaattagcccggcatggtggcctgtaatcccagctacttgggaggctgaggcaggggaatcgcttgaacctgggaggcggaggttgcagtgaactgagatcacgccactgcactccagcctggcgacagagcaagactctgtctcaaaaaaaaaaaaaaaaaaaaaaaaaagaaaagaaaagaaaaagaaaaaaaacaacaaaagagagagagagagcacagttatgaccacagtgctgcatattaacatcaggtgatatgatagacattgttaacctccccagcctcagtttcctccagctggaacatggggataatacaaccttcataagcccaggagccttaagtaggttactgtgtgcatattccttgttactgtaagtgctataaaaaaatgtggattactcctaagtgtattgtgatttattttattttattttatttttgagacagagtctcactctgtcatccaggctggagtgcagtggtgcgatcttggcttactgcaacctccacttctcaggttcaagtgattctcttgcctcagcctcccgagtagctgagactacaagcgtgcactaccatgcctggctgatttttttgtatttttagtagagacggggtttcaccatgttggccaggctggtcttgaacccctgggctcaagcaatccaccggctttggcctcccaaagtgcagggattacaggcaggagccaccacgcctggccatactttattttatttatttattttttgagatggagttttgctcttgttgcctaggctggagtgcaatggcatgatctcagctcactgcaacctccacctcccaggttcaagagattctcctgcatcagcctcccgagtagctgggattacaggcatgcaccaccaatgcctggctaattacattttttttttttttttgtagagacagttggggtcttgctatgttgaccagactggtcttgaactcctggcctcaagtgatcctcccacctcagcctcccggagggctgggattacaggtgtgagccactgggtctggcgtgtcattaatttccgaatgaggagttccacaaccgaagggacctgggttgattgctgcaccctcagcccctgatgtgttgacaggtatacagagaattgaaaacacagacacatgtccctgcccccttgcacataagtacatcccagtgtcccggactcccacacacaccttggtacaccgacatgggggcaccactgaccacaaccatccgctcgaccagggatgggtagtagatggagaaatgccaggcaaggagggcaccccagtcatgggccacaaggatgcacttcgagtaacctgtgggaattcaaggagctcgcataagtgaggtgcccagtaggactgaagcagggatgggggaagtaggttccagcaaggagaaagcgggggtatgcgtgtgtgcaggatgagggaggccacgcctaggatgggggtatgtctgcacccaggcctaggatgacatctttgatgtccaccagcagcaggtcgattgtgtagcagtccacatcccgaggtgcatccgaggggccatagcctcgcaagtccacagccacaacatggaagcggctctggaactcccggagctggtaacgccaggagaacctgccaggcgggcgagggagggaggctgagtcagggccctcaggttgcacctgcaccctacgcacatcagcaaccattggcaaaccctccttcctgctctaaacttcccctaaaaggaggatggggaatcccaggcagaggcagaggctgaggctgaagccagctacaccctgaatccagggaacttcaatcaacctcaatacccctttgtcctgtcccttcagggcctagggatcctgggtatgctggctcagtacccctatccccatctatgttcagcttgtcccgatctatacagccctcctccctgcctcttgggagcccaagctccacctgcccccgagtcccgtgggcctcaggcccctggccccagacgtaccagttctcagggaagccgtgcagaaacagcatgaggggtccgttacctcgtccagccgagacatagtgcagacgcaggcccgagctctagggggagggcacagcctgaagcctggggaaccctctctcccgaggcttgaaccgtctcgaccccacgcgaccccgcagccccgatagcgcccccgtgcgatcaccttgaggttcaggaaaccgtgctcacccagcgaggggtcgctcaggcaggcgggggacgcgctccgacggcgcccgcagcagccgcgccggggccggcacagcacgtgcgtgagcgctatgcagccgtagaccgccgcggccaccagcgccaccgagaacaccaggctccacatgaaggcgcgcagcagcttcagcgacaggcgcgacggcgccagcagcgcggtcaccaccagctccggcatgtcgccgcgctccgggaccacggcggcgctgccggccaggggcacctgcagcagcggcgaagcggtgtcagggctcaggggcccatcgcccttggcctggggcccctccgtgccgtcgggatttgtgggacgcgctgaaggaagaggcgggcggctccgacagaaaacagccagagcgcaccactcacctgagtgccaggtaaacacctgggcgcgacagggacaggaaacaagggtagggtgcggaggctggggaggaagaggttggaaaggggggaaataaatgggcggggcctagcaggtcctgtgcggggcttagggccggggcggggcccaggaagactcagcagcgggtgggtgagggtctaaaggcggcaattccgggccgggtgcggtggctcacgcctgtaatcccagcactttggtaggccgaggcgggcggatcacctgagatcaagagctcgagaccagcctgggcaacgtggtgaaaccccgtctctactaaaaatacaaaaattagctgggcgtggtggcgggcgcctgtagtcccagctacttgggaggctgaggcaggagaatcgcttgaacccgggacgtggaggttgcagtgagctgagatcgcgccactgtactccagcctgggtcacaacagggaaactccgtctcaaaaaagaaaaaaaaaaaaggcaattccgagcccagacaaaccttaaggaggggatcctggatcttcagttaagtgggcgacacctggagtgaggggcggggcatatgcagagtaggtgcggcctacaagccaaaaaggagaaagagttggaatggtgggcctggcttatgcgggtgggcggggagagggtggatcctagaggaggtgaggcctaacattgggcgaagaaggcgggagcctgggccaatgagctgacggtaggccggggagggggcggtggggtggggtgggcaatgggcaatgagacggagggcggggccgggacctaatatggcgggtcaggagggtctggaagacgaagaagagggacaggcaatgccaggtctaggactaggagggaggcgcgggcggtattagcggctggaggaggcttcgggaggcccggccgacggccgccgcctggtgctacccacccaggggcgcgcgaccctcccttcggtctggctccaaagacctagcagcactgacttcacccagctgtggttccaacggcgggtccagcggcctcggcccggcgccgtcctcctgctggcccaacaggcccgccagcccgcccctgtacgtctgtgattggacggcggcggccactgatgttcaagcgacaggtcctggcccgggagccaatctgcaggtgttgaggcccaggctccgagagcgggccgaggaggcgtggataccctgattcctagggggcaggcctggttcccccgaggaggacccggcctatgaatgactggagttctggggttctggccgaaagaggaagtgggacagggccgggtgtgatggggcctagagtcacagagccttgcggccctgctgtccctgcaagaagccagcttctggccaggcgcggtggctcacgcctgtaatcccagcactttgggaggccgaggcgggcggatcacgaggtcaggagatcgagaccatcctaacatggtgaaaccctgtctctactaaaaatacaaaaaattagccaggcgtggtggcgggcgcctgtagtcccagctactagggaggctgaggcaggagaacggcgtgaacccaggaggcggaggttgcagtgagctgagattgcgccactgcactccagccagggcgacagagcgagactccgtctcaaaaaaaaaaaaaaaagcagccagcttcttcctcctattttgcaaccttctcccgatatccttgaacattttagggacagccatcacttaaccatagagcaaccctattaagtctaagtagcataatcacattcctgtagtatagatcatgaacctgaaattcgaggatgaagtcatttgcctgaagacatacatcttgtaaaatagccatccgcaaagatgtagggaaaaaggcagcgatctgtggctacacctccccttcctcccggaagcagccactggaacgtttttagctttttctttttttttcagatggagtttcgatcatagctcactgcagcctcgaactcctgggctcaagcactacaacctgtagttgggactacaggcctgtgccaccacactcagctaatttttcaaaaacttttcagagagacgacttgctatattgtccaggctggtctcaaactcctggcctcaagcaatcctcaagcctccacctcccaaagtgggattacagatgcaagccaccgtgcctgacctttatttcttgacttaaccaatgtatgacatcagccactgacttgctcacatcactaccccggacgtgccgttttttgtttccctgttagtttcctttaaaaacactccacttgtcacctcttgcccctttccacctcccacttttatccatatacctttgtactgtcaaggctgctaaacattatactgtcctgggaccataactaagtccatgaagttgccacttaaaggtgaatagtggtttatgttctgcctcagtgaacaatgcatctcaagagccgaatagaccactatgattacattgcccatagtgtacaaacttttgttctccctggactacttaaccactacctttcttttgttgtgtgattagcctacatcaaagctttgggggtttttttgtttttgttttttttgagatgggagtctcaccatatcacccaagctggaatgcagtggtgtgatctcggctcaccgcaacctccgcct

SEQ ID NO: 38 - DNA, 3479 bp, Homo Sapiens
gctggagcgaagcttgcgggacgtcgtagagaaaaccatccaaaagtacggcaccaaccccgaggagaccgcggccgaggagagctgggactatgtgcagttccaggtaagcccccctcctccagttccctcccggactgacccgcctcagccctgtgcttggaggagactccaccccaacgtgggcccgacccccagctctacgatcctaacacaccccaatccctcccaggcccgacgctccccactccccagatgacacaactgtccccggcgtcgcctggtctcccagtacccagaccctggcgtggcttcgccatctacctcgagagactccgcccccgcccccgccccgaccagaggttgtcaggcccctagtcccaagaccctagcgagacacggcttcctaccccgtagtgactctggcttccaccggaccccgcccccgatgagactcacatggtctcgcactcctattcacctgtcgggtatcagaggctcaattgcaccacccacccaatctctagtccacagcgcgaccctgcagctccttccccagccccaggtcaccccgtgactcgtctttcccagccccatgttcccgtaatgtcccctggctccggccccatcgtgaccccagcccactgtcccccactccacacccaccacttagtcccctgctccccgacctgacctcatacccatcaccttgtcccctgatccccaacatcatatgtctccagtcccggtccctctgactcgtatccctctcccagctgcgctgctgcggctggcactacccgcaggactggttccaagtcctcatcctgagaggtaacgggtcggaggcgcaccgcgtgccctgctcctgctacaacttgtcggcgaccaacgactccacaatcctagataaggtgatcttgccccagctcagcaggcttggacacctggcgcggtccagacacagtgcagacatctgcgctgtccctgcagagagccacatctaccgcgaggtgggcaggggttcggagcataaacctgtcgaatggggcggggcctgcgggagggggagggctgtcagtgagtagcggcctgagaaagggcggggtctacgagaaaaggaaaggtacggcaggaggggcggggccctctgaagggggcggggtctgcaggaagggcagggcctaaagaaaaggctgggctggctctggaatacagatgtctagggaggggccaggcttggaaaaggtgaagcgagggtgcactagtaaggagactagagtgccctggtgactaggggagcgggtagatgcctgaagacggtgagggttggcctgaaaagaacgctgggcctgggcttgagagtcccagaaagaatccctttaacttttccctacaccccccagggctgcgcgcagggcctccagaagtggctgcacaacaaccttatttccatagtgggcatttgcctgggcgtcggcctactcgaggtgatctggccccgcccccacccgcgatcggccctaaatccctagatggccctgcccttcatttcgcgtccttcggttgcctgggaaggacgagctcagggcggagcgcagcccaccccggccctcccgccgctccacccagcaccggagggtgggggcggcccagcttcagggagccctgattgggtgtacgcagggaaagcctcctgctattggctgcgatctccctcccctttctccgcagatgactgtcatggtgctgagcgtacagctacagcgcagggcactccgccggaaatgcgagccgcacgtgccgggcgctggggattcgagccccgggcccagcctgatcgctgacggcggcggcgggcacagcggcagtctgtggggtggctggggcatggcgggtgcctgccccaactggggagacaaggcaccgcagggcaagctgcccatggccctggggctctggccgctgtgggttcaagacgaggaccagcctgacactggaagtgcgggcgcagaattagaggaggcacaattagaggctgaggcagagggggaagacagatgagcctccaaaataaaggaccctgggcttgcttccgaccttactccttctcagcctctacccccacttgtagcagctattcccgcctcatcagccagccctgcggcagttcccgtcgagccccgcccttttctacctatccccttctccagccccttcccgcccaattcacggccccacccctgacctttctcgcccgggtgggcatcacccccgtctcgccagcaccccttcgacttctctgacctcatctcctttctctatagctcgggttcatgacgctctcgatattcctgtgcagaaacctggaccacgtctacaaccggctcgctcgataccgttaggccccgccctccccaaagtcccgccccgcccccgtcacgtgcgctgggcacttccctgctgcctgtaaatatttgtttaatccccagttcgcctggagccctccgccttcacattcccctggggacccacgtggctgcgtgcccctgctgctgtcacctctcccacgggacctggggctttcgtccacagcttcctgtccccatctgtcggcctaccaccacccacaagattatttttcacccaaacctcaaataaatcccctgcgtttttggtaaaatagctttatcctctgtcagaacacaaacaaacaaactttgagaggggaggaaggaaaccgtctagctcagggctcacttaggagagggatgagattagaaagttcaacacactgcttgtgcagcggagataaagtcaagaccctagcacccacttataaatatctcgttatattaaaaaaaaaaaaaatgtccagggcccacctggctctgctcctgcacagaaagggttcatcttcactttgtgatctcacaggtcatggagtgagggtggtagagaggggcagaaatttcagggggaggggtggctgggaaaaagtaaaggggacaagccaatgtgtaactagcgctctccaagacatgcagaggagtgggggtggcctgtcaggggctgaaaagaaaagccagtgctgtacctggggggttgtctcactcctgtccccacaatccctgatactccggagtgatctgtcctttcagacacccactgtgaggtcccaatatcggggtttatcctttcctcagtcccagcctgttcagctctccaaccaagttttgggggcccctctaatgggggggatggccccagttgcttaggcctctgaggtcaacccctttacatcacagccctctccccaaataagaagcatgaggtgagctggaggaccctccctgggaggagggtgttctggggggtgagccagttttggggtcccccttcagtccctgaccaggcggtaaatgtgatgctgggccccacgctcgctggtggagacctcgaagacataggcggtgcag

SEQ ID NO: 39 - DNA, 10857 bp, Homo Sapiens
tcccagcgccttggggggctgcggtaggagaatcgctttgggagcaggagttgcaggccgcagtgagctatgatcagcttgggcgactgagcgagaccctgtctctaaaacaaacacacaagtccgggcgcggtggctcatgcctgtaatcttagcactttgggaggccgaggtgggcggatcacgaggtcaagaaatcgagaccatcctggccaacatggtgaaaccccgtctctactaaaaatacaaaaattagctgggcgtggtggtgcgcgcctgtagtcccagctactcgggaggctgaggcaggagaatcgcttgaacccgggaggcagaggttgcagtgagccgagatcgtgccactgcactccagcctggcgacagagtgagactccgtctcagaacaaacaaacaaaaggatagaaaggcgagcacaaatattcccaattcataacactccctcgcactgtcaatgccccagacacgcgctatcatctctagcaaactcccccaggcgcctgcaggatgggttaaggaaggcgacgagcaccagctgccctgctgaggctgtcccgacgtcacatgattctccaatcacatgatccctagaaatggggtgtggggcgagaggaagcagggaggagagtgatttgagtagaaaagaaacacagcattccaggctggccccacctctatattgataagtagccaatgggagcgggtagccctgatccctggccaatggaaactgaggtaggcgggtcatcgcgctggggtctgtagtctgagcgctacccggttgctgctgcccaaggaccgcggagtcggacgcaggtaggagagcggccgcgcagacctctcgcctgctcctgcccaggggcccgccagggccatgtgagcttgaggttcccctggagtctcagccggagacaacagaagaaccgcttactgaaactccttgggggttctgatacactagggggagttttatgggaaagaggaagcagtaattgcagtgacgccccgttagaaggggctttctacctccccagcattcccccaaagcagggaccacaccattcttgacccagctccacccctgtcggtaggtgctggcttcttcccctctcctggtggtggtgggtggttcccgcggcggcctggagccggaggggcgcgcgaccctgggctgggagctccgagggcctgggaacgagacctgagaccttggcttctcgaaggtagtagggacttgggagtggtgactgaacctggtctggctcctccttacttcctcttgttgcgggtgggacgagctagcttccgcctctcccagccactttttcctgctcatttgcagctaggttggctccccttttgggaatttcctctccccttggcactcggagttggggggtgccacctagtggaagataacggagctagggtcttgaagaggctgctgtcccctctggctgttttggcggtgtagggtggcatgagagactgcgactcgcctcctcatccctgtttctgtatgcgagtgcttgtattcagtagaagcatacactatactccctcaatttagggtaaacaggaggggccacatgcacaggtaattcaccagggagccgaacactcctgtgcagacagactccccttcccagcaagccatggcagcggacagcctgctgagaacacccaggaagcaggcggtgccagctgcaggtgctttgcctgggagctgtggggctgaggagagggtccactgtccaggaccagtgaacttcatccttatctgtccaggaggtggcctcttggggatgctgagttaggggaggggcacttgaggaaagccaggtggagcagagaggatgtgagtgactgggtgggtgagatttcctgcccctccccccgcagtggtatccacacctagactcgtggggtaactgaggcacagacagagagcaacttctcaggccctcacagttggcaattctaggattaggacccaagtgcgattttcaggcagtccctgtaccctgtttctgttgtacctgttgcaccattcccaggcactgcccatcgtgccactagtgatatgaacccaggtccaatacgctctggggccatcaaagcctgacgtcaccatgacctgatgtgtgacgtgttataggtgtcccttggtatcttcacggaactggttccaggaccccaaaatctgtgggtgctcaagcccctgagataaaatggtgtaatatttgcatataacctatacatactttaaatcatttctagattacttatacctaatacaatggaaatgacatgtcggctgggcgtggtggctcatgcctgtaatcccaccactttgggaggccgtggcaggtggatcacctgaggtctggagtttgagaccagcctgaccaacatggtgaaacccccatctctactaaaaatacaaaaattagccaggtgtggtagcgcacacctataatcccacctacttgggaggctgaggcaggagaattgcttgaacctgggaggcggagttcgcagtaagctgagatcgcgccactgtactacagcctgggtgacagagcaggactccatctcaaaaaaaaaagagaaaaagaaaaagaaatgccatgtaaatagttgtgatcctgaattgtttagggaataataagaaagaactatctgtagatgttcagtatagatgcacccatcgtaagcctaactacattgtataactcagcaacgatgtaacattttcaggggtttttttgttttgttttttgagacagaatctcagtctcactctgtcacccaggctggagtatgttggcgtgatctctgctcactgcaacctccacctcctgggctcaagcgattctcctgcctcagcctcttgagtagctgggattgcaggtgtgcgctaccacgcatggctaatttttgtatttttaatagagatggggttttaccacgttggtcaggctggtcttgaactcctgaccttgggatccgcccacctgggcctcccaaagtgctgggattacaggcgttagccaccgcgcccaatatattttgatccctggttggatatggagggctgactgtacttaacatctctaagcttcagtttcctcctttaaaataaaggtgtggctgggtgtggtggttcaagcctgtaatcccagcacttagggaggctgaggtgggtggatcagctgaggtcaggagttcaagaccagcctgaccaatatggtgaaaccccctctctgctaaaaatacaaaaattagccaggcgtggtggcgagcgcctgtagtcccagctacttgcttgaacttgggaggcagaggttgcagtgagctgagatcgtgccactgaactcgagcatgggcaacagagcaagactgtctcaaaaaaaaaaaaaaaaagggggtgagcagacgtggtggcacgctcccacagtcccagctacttagtaggaggccaaggttggaggattgcttgatcccaggagtctgagtccagcctgggcaacatggcaatacctcatctctaaaaataaaataaaagtaaaggtattaattactactttggatggttgttgcaaagaaatatatataaaataatggagagtcttgtaactggctcccaagaggctcaacagacattactgtttttgcttcttcattatgagttacctctctggccaccccactgaactagctgggctagctgagcctgggagaagagttgtttaggaagtgagaggctgctctccacagagactcaaggctcagttcctcctggtgactcagatgggcagcccagtgggcacacgtggtctctctccacatgtggctgagtttcacttccagaatagatggagaggcaagggcagggtttagcatgcttgaggaatctcagagggccctggtggtgtgggggaccctcagaacacaggtgtctcaagggctgacccagcttctgtgtccttttctctgggtgaggaggggacattcatgggcagatggtgacctctggggaaggcagcccagactccactggccaccatatttcctttttcacaactttctcacccctgtggtttcccatgtcatcatgtggccgcttcccgcaaggccttagcggggtgcaggtatgaacatagtgtcaggcaaggaggcatctggaggggaaccctggcttttcctggggggactccctccctgcaccctagccctgtcctctcccatggctactgatgccttcccctcaccccagaggtggcccacatctgcacagatcagacccacaaaaatcacgtcttcctgactctcataagcctgcccagtgaggcccaggcattaggccatgtgctggggactcagacccacacatatacgcatgtcagcattcatgcttacaggtccgcacatgctggggcaagtgtcacacacggggcgctgtaggaagctgactctcagcccctgcagatttctgcctgcctggacagggaggtgttgagaaggctcaggcagtcctgggccaggaccttggcctggggctagggtactgagtgaccctagaatcaagggtggcgtgggcttaagcagttgccagacgttccttggtactttgcaggcagaccatgtggaccctggtgagctgggtggccttaacagcagggctggtggctggaacgcggtgcccagatggtcagttctgccctgtggcctgctgcctggaccccggaggagccagctacagctgctgccgtccccttctggtgagtgcccctcagcctaggcaagagctggcagcctgggttttcccaaagggtcatcttggattggccagaggaggacgccaggcacaagtctgtggtttatcattttccctgtctttctaggacaaatggcccacaacactgagcaggcatctgggtggcccctgccaggttgatgcccactgctctgccggccactcctgcatctttaccgtctcagggacttccagttgctgccccttcccagaggtgagcgtgccatcagcccagtggaggggcttaggtctgcatttatgcttttcctgcactctaccacctgcagataaaagggccctgccaatgcaggtttctctgtgttccacaggccgtggcatgcggggatggccatcactgctgcccacggggcttccactgcagtgcagacgggcgatcctgcttccaaagatcaggtgcagctggggtgtgggtgcagggcaggcagacgggcagcatgtggagtctggaacccaggagcccagctggcgggggcagccctgattcctgcccttgtgccctcattcatgtggcatctgtactaagcaacagccctgctgtggacagaggggcagcactggggataggagggtgcgggagaaagtgcaagactccaggtccaggcgttgtgggggtggggagaggtcgagctgggccggtctaataccaacccatggtcagtgggtgccccttccccatgccatcttgctgagggagggactggattgtgaggagggtgagttaggcctgcctaggagatcactgagccttagtgtcaccctcaaaccccagtagctgggcttgcaggccctggtgccaccagctccttgtgtgatgggggagtcaccttccctgagtgggctggtagtatcctgggtcatcttgtccacaggtaacaactccgtgggtgccatccagtgccctgatagtcagttcgaatgcccggacttctccacgtgctgtgttatggtcgatggctcctgggggtgctgccccatgccccaggtacaaatctgggggagatgggggtatgtggagggaagtgggggcagagttgggggccaggggcagggggtgaagacggagtcaggaccattttttctcaggcttcctgctgtgaagacagggtgcactgctgtccgcacggtgccttctgcgacctggttcacacccgctgcatcacacccacgggcacccaccccctggcaaagaagctccctgcccagaggactaacagggcaggtgaggaggtgggagagcatcaggccaggggctggggcggggcctcattgactccaagtgtaggaaaaagtttcctccatcctggctgcccctcacgtttgctcctcttccagtggccttgtccagctcggtcatgtgtccggacgcacggtcccggtgccctgatggttctacctgctgtgagctgcccagtgggaagtatggctgctgcccaatgcccaacgtgagtgaggggctggagccagcttggctgtgtgcccccagccacctggccctgacacgcaccttacaggggctctgtggcatggggctggctggctgcttgctgggagcctggctgatgcagggttcatgctaccccctagtgggggattggggcagtgccagccatcagcctggctgctccctgtgtgctactgagcctggaagtgacaaagacccacccctgtccccactcaggccacctgctgctccgatcacctgcactgctgcccccaagacactgtgtgtgacctgatccagagtaagtgcctctccaaggagaacgctaccacggacctcctcactaagctgcctgcgcacacaggtaccagaggcagggtgcagatacaggggtggggccccctttcctcccttttaggcctggccttaggatcactgcaaggtggtgtaagcggtaccctccatcttcaacacctggttccagctgtggagccggcaaagggttgatacccctgagggtccccagtgccacttctgacctgtcctctctgcttccctcacagtgggggatgtgaaatgtgacatggaggtgagctgcccagatggctatacctgctgccgtctacagtcgggggcctggggctgctgcccttttacccaggtacccaggggtggcgggtgggtgggctgagcacagtgtggcaggcagccgggccccagtgcccacctgcccttcttcatctgccctaggctgtgtgctgtgaggaccacatacactgctgtcccgcggggtttacgtgtgacacgcagaagggtacctgtgaacaggggccccaccaggtgccctggatggagaaggccccagctcacctcagcctgccagacccacaagccttgaagagagatgtcccctgtgataatgtcagcagctgtccctcctccgatacctgctgccaactcacgtctggggagtggggctgctgtccaatcccagaggtatatgggaggggacagcatcttggcctgggcaggtgggtggccaagctcctattgctttctgccctccgcatagcccataggtgatacccagctctgacagattcgtccccagctggaggtgctgtaagcaggagaggcgggctggagtaggtaggggctcggcactgcgccccacatagtggctacctacaacgccctttcctgcccaccccccaggctgtctgctgctcggaccaccagcactgctgcccccagggctacacgtgtgtagctgaggggcagtgtcagcgaggaagcgagatcgtggctggactggagaagatgcctgcccgccgggcttccttatcccaccccagagacatcggctgtgaccagcacaccagctgcccggtggggcagacctgctgcccgagcctgggtgggagctgggcctgctgccagttgccccatgtgagtgcctccctgcctgcccctggataggggagctaagcccagtgaggggacaggaacataatgccattctgtgctcccttccccgccaggctgtgtgctgcgaggatcgccagcactgctgcccggctggctacacctgcaacgtgaaggctcgatcctgcgagaaggaagtggtctctgcccagcctgccaccttcctggcccgtagccctcacgtgggtgtgaaggacgtggagtgtggggaaggacacttctgccatgataaccagacctgctgccgagacaaccgacagggctgggcctgctgtccctaccgccaggtcagtgccaacccccatcctggggctgggtatggccagggaccaggtcccacctcgtccaaccctctcgcccccctctgaccatccagggcgtctgttgtgctgatcggcgccactgctgtcctgctggcttccgctgcgcagccaggggtaccaagtgtttgcgcagggaggccccgcgctgggacgcccctttgagggacccagccttgagacagctgctgtgagggacagtactgaagactctgcagccctcgggaccccactcggagggtgccctctgctcaggcctccctagcacctccccctaaccaaattctccctggaccccattctgagctccccatcaccatgggaggtggggcctcaatctaaggccttccctgtcagaagggggttgtggcaaaagccacattacaagctgccatcccctccccgtttcagtggaccctgtggccaggtgcttttccctatccacaggggtgtttgtgtgtgtgcgcgtgtgcgtttcaataaagtttgtacactttcttaacagtgtctgatttgccgccctgcctgccctccccagggccccagaacaggggttcacgtccactgccaacactcccctcccctaccccacagaaagacatacacagccttaacctcaccagttttatatttgctgctgcccacatcggctgtatcacattaccccctagtccccagagctgtcccagccaccagccctgtgacatcgtagcccagagatgggctagtcagcaagcagcaccccctcccctcccaggggtccacaaagaacgccccctcccttcccagccctcacactagcagctgaggctgggtcacccctcctgctttcccacaatagagctttctatgtacagccacgtctacacaggcactgcttccccccagccctcctccccggcacctccccgtgggggtctggaccccccctcctccccggcttggaggcagacacagggtcccttgcaagacacgacccagcaccaaccacggaacagctccaaggcccctgggcccctctccggcctggggctgggagctacgcgcgagggcccccgcgggcccccggggcgcgcaccctgggtgcgggcccgcgcgggaggggcggtgccaggccctgcgcgggcgctacttgacgttgaacaccatcagcggccgctcctcccgccgctgccacgggctcttcttgtctcccgcctcgtcgcccacctccgcccccagctcgtcctccgggctggtgagcgagtcgcgccgcagctcgctggcgctgctgcgggagctgtccccgcggctgcggccccgcccccggggtaccgtggccgcccggccctcgggcgccgccacctcgtccagcagcggcgtcagcgagttgtcctccggagagcagaggcccgtgcggctctcgctgctgctgggctccgtgtcctcgctgagcgccaggcgcgggggcgcgggcggcggcggcggcgcggcaggcggggcgcgctcccgctcctccctcgcgggccggcggcgcgcgggccgcgcctcgtggacatctacgcccgagtccaggctggcgtcggtgctgcgtgccccgccgcccgcctgcaggtcgatgtaagagtggcgcacttgcgagttggagcgcccgtcgagggacacgaaccaggcgcgcgggtgcggcttcacgcccagttccagcagcttcttctcggtcagggcctgcagctccccgttgagctgcgccatggtggactcgttgaatagcacagggatggtgactgagccactgacgggcgccgcgcgcccggccccccagccctcgccgccgcccccgccgccctcgccccccgggcccgagtggcccggcatctgcgggcgctgggggtcgggctggggaaaagcgcgcgccgggccgggtgccgtgccctccggcggggccggctcgtcgcccacgccggcggcgcccgcctcgccgccgaggcgcacgtagtgcgcggggatcaccagggtgggcatgacgttgcggtagacgttgtccttgaggtggtcgatggagccgcagaagatgagctgccccgcctggcccagcgacggcggccgcgccagctggtccaccgactgcgacagcaggaagtcgggggtcttgccctcggccgcccccttgtggcccaggtagtggtcgaagggcggcggcggcgagggcggctcgtgcaggaaggccgcagcccccgagggcccccgccggtgctcctctaggccgggctccagcccgccggggccctcggccgagcgagcgcccttgagcccggcgctctcgcccccgcgggcacccgaaggctcggcggccgggcggctggcagagcgcggcttggtgcggaagaagtcatcccgggaggaggccaagtcccgggagctggagaaggccgagtggagggggcctggaggcggagcctcggggtcccccgacggggcgggttccaggggtcccccacagatgaggtggagctgggacatcgaggtggcctggtctcgtttgttaccgtcagagggccccgagagctgcagcttgcggtgctgttgcctcggcttcaggcagcgcctcctggaagggagggagcagaaggggccgctcaggaaagggtgagggccaaagtaggccccgaacccccttagatgcaagacaagagacgaatatagtggaagaggtggggagaatgcctggggcgctcaggagagatggcggggagccgccgtgtccgtttggcgat

SEQ ID NO: 40 - DNA, 5465 bp, Homo Sapiens
tcccggacttggcaaggtgcggtggcttatgcgtataatcccagcactctgggaagcccaggtgggtggatcacatgaggccaggagttccagaccagcctggccaacatggcaaaactccatctctactaaaaatacaaaaattagccgggcatggtggtgcacatctgtagtcctagctacttgggaggctgaggcaggggaatagcttgaacccgggacgtggaggttgcagtgcgccaagatcgtgccactccgctccaacctgcgcaacagagtgagattgtctaaagaaaaaaaaaaaatcccagactcaatgccagctgtttgtgttagcctggggatccttcacttatagggtgcagtctggccaagaggaaggagctatataacatggttgatggaatttctaacatttaagctcaggggtacatgtgcaggatgtgcaggtttgttacataggtaaatgtgtaccatggtggtccactgcacagatcatcccatcacctaggtattaagcccagcatccgttagctattgttcctgatgctctccctcctcccacccctcaccctctgacacgccccagtctgtgctgttcctcccatgtgtccatgtcttcttaggttgatgtggtcttgagtgacccctccttgcctttcctctttaaaaacaagatctaaaaggctatgttctctatgggttggaggtgttgcctcgatctgtcaagcacagtccaggactcagaggctgttgtggtgaactactgtaggcacctggaagccaccaaggtgcccttttcccgcactctagtcccaagtgagggaaataagcctatggttaagggagaactatctaccaatttgaactcattaaaatacataaatgtgtccactagaaatggctggctggagaagcccagtaccaaatcaccccgttcctgaaacccaccagccccatgaaatagttcgctagagagagatttgcaatctttgaattcgttgactatcaacctgtataggtgctccgtgccccgagatctgagaaaatgacaaaatacgtctacttcccggccgggcacagtgactcacgcctgtaatcccaatactttgagaggccaagttgggcagatcacttgaggtcaggagtttgagaccagcctggccaacatggtaaaactcccgtctctactaaaaatacaaaaattagctgagggtggtggtgggcgcctttaattccagttactccggaggctgagccacaagaatcgcgggaagcggaggttgcagtgagtcgagatggggccacagcactccagcctgggcgacagagtgggactcagtctcaaaaaaaaaaaaaaagtatttcccaattcttcgtcagtttttgccctctccccacttcgccttctccaggctcctgaaaagtatctcccccaaccctttctgtgtacacggggaaaacacgtgttcatttttattatggcgctgaaacctacccttctcttcaaatcgcttctgtagatcgttctagtataaaatgtggcaagaggctaaagggagagatatagaccagttctttggccctcgctttccaacttcaagttacacctgtgaaactcatgggtccttccacagccttcaaaaactaagggcgtcccctgtcctctccccagatgtcccttccccatcgccggtagcgagtgggagacagctcagcgcggggcaggggagcactgggcccggagatggaaggcagcgtcaaaagcgccgctggaaaatccctgagcgctaaccgttgcctgtgtgagcccttaaatctacaaatttccaacacctgtagcctttgggtttcccaggacttccatcgaccctggcggcagagagggcaggcctgagatgcagtgacttgagggcacatggccaactcttgtcactccaagatcacactggggaaccagactgacttctccaattctgaactcgccccggcctcgggcggctcaaagggcctcctctgccgcatccccgccaaaaccaaaccgcctggcacaagccggtaagcaaccaccctgctgggagagggaaggaagagtaggcgcagccctagatcaatttccttgcactgcttctcccagacggtcaagtcagctgcgtcccaccgaaaagggcgcatcgcccacgcccgaaacgcagccgctgggggccgagaaattatccccacctggcccgagggccagggacgcaggagcgcagcagcgtggaggggctccgcgctggcccggcgctgcccgcggtcctgccctcgttccaagggcacggcgccggtacgaggacaccgacgctgtggcgcaactgccgtcccccgcagcaatcccggagcccggctcccggccgcccctcggccctgcgcaggctgcctctccccgacgcggagtcccaccccgctacccgccgcccagacgacctcataaacaagtcctcgaagtgcggaggcaggaggcggggcgcagcgcgggggcaggaggcgggccagggtcagggcagaggctgcggccgcgcgtccccattggccgggacgcagtgagccgcccggagctcggcgcgggcggggcctgccggcgcgtgcccgcccacacacccgcgccggtgcccgccccccgccctccgcgcccgccccgtgcccgccccaagccggccgacggagtttttaaagtgggctgccggccgcgggagctttacactcgcgagcggaccgccacacgggtccggtgcccgctgcgcttccgccccagcgctcctgaggcggccgtacaatcctcggcagtgtcctgagactgtatggtcagctcagcccggcctccgactccttccgactcccagcattcgagccacttttttttttctttgaaaactcagaaaagtgactccttttccagggaaaaaggaacttgggttcccttctctccgtcctcttttcgggtctgacagcctccacccactccttccccggaccccgcctccgcgcgcaggttcctcccagtcacctttctccacccccgcccccgcacctagcccgccgcgcgccaccttccacctgactgcgcggggcgctcgggacctgcgcgcacctcggaccttcaccacccgcccgggccgcggggagcggacgagggccacagccccccacccgccagggagcccaggtgctcggcgtctgaacgtctcaaagggccacagcgacaatgacagctgacaaggagaagaaaaggtaagcgggcgtccgggccgatcagggggccggtccgaggccagggccgggctgcgcggggcaggcgcgaccgagagtggttgggagaagagtgctgagaggtcttcggagctcgaggctcggtttggagggctgtgagggggagagcatgtgcccggtttgggggcgcggatcagcagctttgcagtggagacttctgcggctcggaggagtcggggatttgcgcgcacggcgaggccaggaggccgagggagatggcctggaggtcggaggtgcttccgcggtgcctttgaaaatctcccagccgccccgcagcagattaccgtggccaccggcgcttggaaatgtttgtgggtgcatgtcctcgactttctctggtctctcattttggggcagcatccacgtctctatttttctctggattcgcggagtccttccaaatgcgctcctgtgcccgcgccgcggcccaagtgggcaaaggggggcgggaggcggagagcggctcagggacacgatcctaccgaggagccaggacccttcagagcgccccgctgccgggctccagaccccaccgaaggttggagaacccacttcctcgtgccgcaccttgactctggggagagtaggtagtgagtgacctggattgccctgcgggggcagatggttcggtgtgtaggaagcggacggcaacactggatgtccctggcaggtccgggtgtctgtctccgaagaggacagagaagggcagccacgatctgcccgcctgccctcgcgagcctctcggcactgggtgagaggcaactctggccatttcttgctgccctctcgccctctcccggccgctcccagtccagccgggcccggcgctacccgagcgagggttcgagccctctgcgcggccgcgcagaagcaggcagggcctcaacttctgcaaatgtgtgcggctcgccgcctgtcccctttctcctcctgtctccacccgtgcggccccagtggcctggagcttccagccccgcgcttggccgcggcttggcgaggctatgctgcgggaagctggaatccaacgcgcggccggctgaaccgcctgagccgcgggaaaccagcggcggagcggcggtatagaggtgcgaggatgaggaggaccgactcgctaagggagggaggtgactggccgggagggctcactgccgaggttgatttgctcttgttccaacttccactacgggactggagccagaaaccgtgtatcctccggtcgaaagcagcggttcccacctcggggcaccgataaggatttgataaacgggagcgaatcgcgcctgtcctggctcggcgcccgggcccttcactgcgggatcgctaggggaggggattgggccctgctcccctttcctggccgtagtcccccctttctcgtcaccgtcgcgccctcagacccaagacaagtgagggagccctgagactgcagccggcacattcccagggccctcggagcagtcctggggttccatgtcttttgaaggcagcagagcaaggaaaagactcttaagattccagtgcgttttgtaaaaaccaatcataatgctaataatgactgaaccatcgaaaagcaaagttatagacagcgcctgcagacgctttcgggtccggagccggggagggaacttgtgtattttacaactgcgatgcctatcgggaatgtggcaatcgccgaggtggggcctgacagtaatcttgacaaatgtgtgaagtgtcagctcctcctgcgctccttagcgccgggttttgtgcagttttgtaccgtatataccgagaaacttgggagcaggggaaaaatgatttcgacacacccagctacagtacctggttcgttagcggactgttggaaagagagaagaagcgggaatgggagcgggaagaacgttgcgtaattagactcccaattattggcgagagcggccgctttaagaaccactgtggggactgcctgcgaaacgccttggaggccgctgtgtgagctgcggctccgggctggtggccacgcgagggtgtccgccctcttcgacctgcctggatttttgtgctgcagaatggcagggcaaacagcgtgtccttcaccatctagagccccttaaggggttgtccaattcctattgggctaatcagtttgagactcatttacttttcgtgcctgg

SEQ ID NO: 41 - DNA, 22169 bp, Homo Sapiens
ggacgcgccagtttcctcctttggacttgatgaggcacgaacgcatctctaataaagccaggtctccccgccgtggctccctgggcgggtgcctgtggctcgggccatgagtcacgctgggtaaccccactacggggaagagggcaggaagctgggagccaccgcctctgtgcccggttgtcatctcggcacgagggcgaccgtcggcttcgtcctgccctcatggctgagggcttttgggatgtggcgggagacgggggagtccacttctcaaacccggtgcatcctgcagggccgctgcactcacaaaaaggctgactccacacaggacctgcctccctgggccttggctcaggctggggcgagactggcctcctgtgctacctgtggaagagtttgttcagcaaattgacagtgtcaacagaatgtcaagggggcatttacccagctttaaacaaccaattcaagcccttcagagatgcacaatggactccgaggccaggggactgcgtagacagggtcgacatctgatgacaaattctcatctgccaattagagcaaggtcggggcgtgtcaccaacctcagtgccaggcggagcagaaggaacaacacgactatttcttggggaaaaatctcaactagcaaccaaggagctggcaggcctcccactgggcgagaacagcgcccacctggtgcccaccagactgaacagccccgtgcaagtgaggccgggtgagtgttctgtggccattggtccctactgtggcggcaggcgctgtgggggttgggtccgggcagcatctgggcctggcctgatccggagacgcccttggtagtggccactcacagactgtgattgcgaggaccccgatggggccgctgtgtgtgcctgggaactgcaggtgtggatgtcagaggcaaagcctcccctgtgcacgcccagcacatcagagccccccagttccctctcacagagcccccagtccctccccacagagcccccagtccctccccacagagccccccagtccctcctcacagagcccccgagtccctccccacagagcccccagtccctccccacagagccccccagtccctccccacagagcccccaagtccgtccccacagagcccccagtccctccccacagagcccccgagtccgtccccacaggccccactggacaccaggccccagacctccttccaggaaattgcaggaaccacagcagggcagccccacagacctgagggaaccgctgccccacccccgccccacagagccctggtgtctgggctgcagctgaggctgaggggctgaggactcggaggatgggatctcccgcccagcgggtgcagccaggtgggaggggccaggcccccagggttcacaaggccccttggggacccacccgaagccaccgctttgcattaggcagggcgtgcggagagggccctgtttaaccgtgcgggctcaatctggagtgtagacggcaggacgcccccagccctgggcccctgagcctgtgagtggggggttcagaggtgaggcctctacagaagtctccctcccaggggcaatgggtgcagggtaggcggggagcactcaggatccctcccaggggcaatgggtgcagggtgggagtgggtggaggggggagcactcaggatccctcccggggcaatgggtgcatggtgggtggaggggggagcactcaggatccctcccaggggcaatgggtgcagggtgggtggagaggggagcactcaggatccctcctggggcaatgggtgcagggtgggtcggggggagcactcaggatccctcccaggggcaatgggtgcagggtgggagtgggtggaggggggagcactcaggatccctcccggggcaatgagtgcagggtgggtggagaggggagcactcaggatccctcccaggggcaatgggtgcagggtgggtggaggggggatcactcaggatccctcccaggggcaatgggtgcagggtgggagtgggtggaggggggagcactcaggatccctcccggggcaatgagtgcagggtgggtggagaggggagcactcaggatccctcctggggcaatgggtgcatggtgggtgggggggagcactcaggatccctcccaggagcaacgggtacagggtaggggggcgcactgaggacactgctggggagtttctcctcccagaattccacaggtctcggagatacactgaaagcaaccccaaaatgctaggaccgcctataaccgccctgcaccacccctggggcaaccaggcaccccgatgctaacacgcacgcatcctcccgacagggagaagtcccccagctgcctgcagacagggcctcgctgtcaagggccactggctggcctggtgccctgcaggggacatggcgcttccccgtcccaagggcaacttggagaggacaccatctgtgtctcagagtgaggggccaggttcctagctctctcctgtcacacgggcctggatctaggccagggcatagccagtcactctaagctgaccctgagggtccagggggagaagcagcctggagccaatcacacagagctctgtccagggaagggaaggccccggagcaggcagactgggcgggtgggggctgagatgcctgcccgccccatggatgtgtccaaagcctcactgccccccgctgccccagccaccgccgctcctttggtctggagctccctgccgctgaccctgtcccagccagcgtggaagctgctccgtggtgggcctcacttgaaagccacagcaggtgcacccagatggggtcccacagcactgactttgcacacaggaggccatgaaggctgcagtgactacccctagcttgtggccaagcccgtccatcctgtggcctggttcttaaggggcatgctcctcccctgcccaggggggcctgcatctgccgtgcccacccataccccagggttcagcatgtagtagatgctcaataaagaccctctactttgcattcttacagcaccaggcgtgtggacgctcagtgaccgcggccccactgtgtgcctcctgggggctaagggatgctgaacagcttggcggctggcatgagtgaggcccagggacaggttgtgagcctgtctcggagtcctgagcaggacaggggccgcgggcacgccagtccatcctacaggttcacctgggaatatgccaggactccctctagggggctctgtggctgtcgggtggctgcaccggcccagagtgagcgccatctcttccaggaagccaccccggacgccctcccaacacctgcctcctctggactgtctgggagctgggatgctggggtccacctctggccagtccctgatgcttctggaggctaaaatgtagtcctcagaagaatgcagttctagtccacgcgtgacatggatgaaccttaaacacatcacgctcagtgaaagaagccaggggcaaaagaccacctatggcacaattccattcataggcaacgtccagaagaggcgaattcagaggcagaaagcgggttagtggttgccaggggctggggcagtcagggcagagtgacagtatttgggtacagtttctgttttgtgcagtgagaaagtcccggaactagatagtggttgaatgaacttgtgaatggactagatgtcaagcaacagcatgctttagttcaaaagtcacattttcagcctggacaacatagcaagaccccgcttctgcaaaaaaatttaaaattagctaggcatggtggtgcacacctgtggtcccagctactctggaggcggaggcaggaggatcgcttgagcccaggagtttgaggctgcagtcagccgtgatcccaccacttcactccagcctgtgtgacagggtgagaccccatctcaaaaaacaaaaaagtggccatgcacagtggctcacgcctgtaatcccagcactttgagaggccaaggcaggtggatcacctgaggttaggagtttgagaccagcctgaccaatatggtgaaaccctgcccctactaagaatacaaaaattagctgggagtggtggtatgtgcctgtagtcccagctactcaggagcatcgcgtgaatctgggaggcagaggttacagtgagccaagactgcgtcactctaatccagtctgggtgacaaagcaagactccatctcaaaaaacaaacaaaaaaaggcaaattttgtaatatgaataagtcatcacccagaatccctccatatacatatccatccccaaaccagtccttagctccctttgctcccagggagcagggtggggtggggcagggccacaaggagaacccaaccaggcaactttggaaaagggcttccctccaccctcccacccctgcagccactgccccttccccagctggggcgaccaccgagcccagcgcaggcctcgccgcagggcccacagccaccaccacgccttcagcccgccccagggtcccgctggctgtagttggaaggggaatcacatacagatggggaaactgaggcccagggaggggacagtgtggggagcacagcaaatcagagccagccctgcttcacagcccctcggagctccgggccccacaggagaaagcgccagcgctgcctgggaaactcgaggccgtcaaacgcagcccggcccacaggtgtgatgccccaaagccagccgctcgttaaagctgctggtatttcctcctcagcccggggaaagatccggaaagttctggatatgcctgcacatgaaggtgaaagctgacgccagcctgcctcagatccccacgccctcgcagccacagctttcccacctgtgcgctggggatgaaaactgcactggcacacctggagggtgggcggccgtctgccagggcttttacgaggctgggtaacagcggcgtcctgagtgtggagctgtcatcgctgcattattgaggaaggcaagctagacgcccaatcgattctgcaaagccacatcctttcactatttatagacgagacatgaaacaggaaaggtcccctccccacagcaaaagggtgcagtccctcggcccggcctggaactgcccagtgggcaccggtggccgctgctgcccatcacaggtgcagggaatgaggaatgaagccagtcccggctcctgtggggtctccagtttgccgcccgcatctgggggtccccgcacccagctctgccctgtggaagcacttcccctggtgcactgtctgccctgccctaccctcttcctgccagggttgctgttttctttctccctctctctttttctattattattcttttcaatggaaaacatgttggctgctgttcagaggcagggcctgccccaaggagccagcttccttcagagcactccaggctcccaccccagtctccgccccaggccttcctgttcctgatgtctccccagtctgagtaggtgagactttctatttgacactgtgtggggttttttttgttgttttttgtttttttgagacagagtctcactttgtcacccaggctggagtgcagtggcacgatctcagctcactgcagcctccgtctcctgggttcaaaggatcctcctgcctcagcttcccaagtagctgggattacaggcacacgccactgcgcctgggtaatttttgtatttttagtagagacgggggtttcgccatgttggccaggctggtcttgaactcctgacctcaggtgatctgcccacctcggatgctgcatgtttttaaacatgtttttctaaccctggcgcccttgaagaccaggttctgcataaacaggaggtcctgtcacaggcctttccgctcagctcagcatgaggaggagaatcaacctgttcctcccctggccacgcccaagacgaggcaggtgactcaatggaaagagccagaccgggtgacaggagctaccccgtccctccccagcctcccaggccggctgcagggccaagtcacttcccgcctgagcctccttcctcttcttttaaggggaagccacgcccccagtccgcttgtagtcgggaaatgacggggcagctcaggctggctggggctgtgtttagggacattcgcttgggagaaggagaggggcagggctagtaggaattctgccactgctgtgtgaccctggggctgatggcgacttctctgggtctcttcttctcacttatcggtgcctgatccagacagctttacggggctgccgggagctatgccaggccaccaccgggccggcacacccccaacatgtcccacatgtgagctaggtgcctctctcacgccttgctgggaagtgaactccacaggagcaggggccatgtctgccctgtccccaccgggggcctggcctggagcagaacgcagcacacagcaggcgctcaaacgtgtctgtgaactggagccaccctgggagatggacttccccggagctggagccatcctgggagatggacttccccagagccggcaagtccctccccaggcagtgccaggcccagcccaccaggcagcacctttaggattctctgaattcactcgtcaatcaattaaacattcaggaaggaggctctggaaaccagcactgtcagccaacggggagaaggcggggaagaaaggagcgctgaccaggtgccctctccacacggttctcatgcaatcctcacacaccaccaagagatccagcgtgtatcagcccggctgacatgctggggaaactgaggcttgcatgacctgatgacccaaggtcacagagctagtggccaggccaggcctcagacacgaggttgtccaaagctaaagcgcaccacccagcaggcagctggacatcctcctggaggtgctgggtgtgacagcctacccccatttctcccagctcctggaagacgccccgtgccattctgactctgccgtcagcagccaacatcttagctgccccctgcctcaacgcccagcccagacgcaggcagccctgggagagcgtttcagaccaaggacgtagtctcacccagacagatagggtccctgcagctcttcccagctctcctcaaaacaaagagaaaaaaggtggagccctcttcagtaccccttgctcacactgacggagctgatgagggggctagagaagagccaagggccacagtgaccccctgggcctgctcagaaggccaccatctccgaccacagccaccacggccacacctcgcacagcagctgcccagagaccaaccatcctccgcccaccagcatgtgctgccaggtgctttctacctggccactggctgaccaggccacggcgacactctgacctcctgggaaggcattttgcaccaacaaaaccactttttccaatcccgggccctgcaaccacctgattggcagcttccggtgaaggttccttctctttgggatggaaagaaatgattcacccagtactagtgagccaggcactgtgacgcccatcatgaccatgccccttctacagcggaggcagcaaatggcaccaaaagccaaagctctttccggggtcacagctggataccacggggccaggattcccactcaggctggcagggctccaagagcctgcaccccagactctttcgagaaacagtgtgggtttctccccttgctgggggagccaggcctcctgcaggtgccctggctaactcctggacagacctcctgggccttctgagaaggatgggcaggaacgggaaggcagaggcacctgaggggtgtatgttgggtggggctcaagcccagggagggagcccggggccttctccgaagcggctgcaatgtcccccagactgctgtgtgagccctgacctgtgcctccacaagccgggctcggctgtggccctggcctccaactctgcggcccagaagcaggagcctgaggacgcgcttccgtcccatcttctcgttggacttgtggggtgtgcacaatggggtctctgtgggctgagctcggctgcctgtcaggccaaactgaagcaggcttcccgccaagaaggagggggcgccaggccccagcaaaggggacaaggccaggcaccaaagccatggtcggcggcctgccttgggctggaaacagctcaccgggatcccaggtttggggaatgggaaagtgggcccatgacaccagtgttttgcggccctgtggcagggttttaacccagacaccagggagctgcagcaatctgtaccccaaagcacagcgctctggcccagggagacctcagtcccagacccctgtgggccaggctgtgcctactccctggtgccactgagaagaagcaacaggcccccaattttcccagcacggtgttcctcccaccctcccaaagtcctctgcaggagcaagaagcttctcccagagccccgaatgggtgagaggcaaagtccgagccgggagcgcagtggcggggaagggggttatacattctgggaagccacgcataattaatcacacggcattaatccgcctcccccaacaatagctgctgcacttcccctggatcccagctgtcggtctctgaatgaaaggaaacaagatttagggcatcaagcgtccgtgcggcttctgcagagggagaagggggccccaaaaagcaaaaaaaaaaaaaaaaaaaaaagtagtgcgcattcattagtgtctgacaaagacacaatcggctttgtccattaaactgctcacagacctgcttaattggcttcagtttggggagggtgggggccggggagggagggggcctgctgcccacaggctgggcagtcggcacaggcaggagccgggctggggttgtcaagggaatgggaccttctgcagttggaatgagggcgcgcagactggctggggagccatttcttcatctgtagctcctggggggcggagggaactctttttccagacaccaaacacctcctcattattctcatcagggatggactcaagttgaagggcatcggccacagcagaacagttccccacggctgatgggcactcacaggcaggcaggagggagcggttccgcacgacttcccggccccctcagtgcccattttacatctgaggctggcagaccagaagggccacgggattttgaggtcagagtttgcagatgccaggacagaaaccagactcaataattaccccacaccccacgccaaaacatgagttccaccttctcttccccagccccagcctgaggccgggaagagggagctggggcaaacagagagcccaaaggcgggtccgattttgaagagtcaatttcctttgaagaggcatcacccacccggaggtggcatcacctgcccaggaagtatcacctgtgcctagaggaggcatcacccgcctagaggaggtatcaccacccagaggaggcatcacccacctagaggaggtatcaccacccagaggaggcatcacccacccaggaggtggcatcacccgtgcccagaggaggcatcacgcacccagaggaggcatcacccgcccaggaggtggcatcacctgtgcccagaggaggcattgccgccagcccaggaggcatcacgcacccagaggaggcatcacccgcccaggaggtggcatcacctgtgccagaggaggcatcactaccagcccaagaggcatcaccacccacctaggaggcatcacccccgagaggaggcatcacctgtgcccaggaggcatcacccgcccagaggaggcgccccaagttggcagggtggtgggggctgggcctctcagtaaatggtccagagcttcccctggcagatcaactgtttcttggggacttaaagaagaattggggtactgggactcccacttagtgaccccggagcctgaggtggcccacggaggagtgcccaagccctcagcagccagaccagctccacacgcagcataattgctggtgattaagtaattgccagactttgtccaataaaagtcagcacgtgaccgtgcccagactctgggccatctccagaagacaatggcctagtgttctgtcccctgcgcggctgcagaaggcaggggctctgccctcgacaaagcaacaggtcccgcaggggtggtactcacacgcaggcctccgtgccattggccgcttcacacttcccgccattcaggcaggtctcaccgggctgggagcatcgcgggcctaggcaggggcaggagaagagaggtcagtctcacccgcaccaccaccaccgaaggccctggttaccctgggggcggggacctgcacccagccaaggggcatcgtccgccccctaccccggacgcactctgctcagtatcatgggttgctggggcacgggtccgcaggaagcccctccatgaaaccaaaggggcgtcaacattctgcccagagttctgtagtcagaaatggggggaaggggagcagcagggaacacgtcctgcttgaagcagggtggggtggcctgatgtgccgcctggacgcagtgggggaaaagcagagacaaagtgggctactctccaaagcgttgccccccaccctggaggctcactgaggagtctggcagggcagggccccccatccagccgccgagattgcctctgttcaaacccgttctgcaagggggcagagctggacggggggagggggggtggccacactcagctcccgcccgtgggaaaatgcgacagctgctcgcccgctaccccgcccgccaacaaagcgccggcctccgcctcagaatcagagcggcccattgtggagtcggggccgcctccaggggcaccgggacagcaccctggggacgcggccccgcctccgccgacacccaatacctgcctccgcgggcgcgcatctccagggcagcccccatacacccacaggagggggatgaaggtcccccattcggaaggaattcgaccccatctcgagaagggatcaattactcaagcccctccctccccatcttaccggggctgagaaacgggggaggggggtgtgacacagagccgcactttctggaagaggacagataattctcgcctccaactctcggagaaagagtggattaatcactcgattccccagagaccccgctcgctgtgcggcggggagaaatgtaagagccccccacccgcgtcccgctctccgcccccaagctttccaaacttcaactccgcaaagcaaaaggaaagttcagtccccccgggcgcggcggcttcttacgcaacccctcccccaaactgagagccgggctggggggcaccggcgggcggggcgaccgggagcccggggacccagcccggccgcgcgggtcagtgaaggcgaacgcggcgccgcagagcccacactccgcgccccaacatccgccccggcgtgggccagaggcgaagaagaaagaagataaatggcccggagaagcaacaggaaaccaaaaccgactctattcaaatcgaaaaatagtaggcagcccgcccgcccggccgaccggcggcaagccccacgcgcggcgggtgaagggcgggcccggagtagggcctccggggccccagcaccccacaccggcctcctaactcggctccaggcacgggcggcgcgagtccgcctccacggggggatcgagggggaaggtcggtcctccctgatcccgggactccagaaccccacgccccgggccgcccgcttttccctctccatgctggcctccccgccgcccgctcccagccgtggggcgcgcgcgccgggcgccgccaaagtttccaaagggcgcggaaagtgggggctcgcgggtgggtgggcgcctacctcgtgcggcgagcgcgggcagcagcgccaggcagagcaggggcgccaggagcggcggcatgcctccccaccggctgccctctgcgcccgggcggcggcctcctgcgctggccggcggggctgggacgcacacgcgcggcgtacggtcccggggcggcggcggacggtcccgccctctcttccccggctggctggcggcgctgtgctctcgcaggcccccgggcccggctccgcgcccggctcgttccttcgctgcgctcgcgcccgcgcccgcgccccgcgccccgcgcccttgcgctccctcccgcggccgaggcactagtgaggctcagagtcgaggtgcgctccgcccccgccggccccgccccgcccggccccacccccgccggtccccccgccccctccgcggccacctcctcccgcacgccccgtccgcctttgcgcctccccgagctgagccgcgcgtcccgagcccagcctctccggggaggagggacccggcggcgcggcgtgggtcgggagcgggcgcctgggactacttctcgtttgaaagttttcagaggccaaaagtttgagccggggctgcggaaggatccggctctggcggttgccgcgctcggcgacaactggcgactgaaatttgcatgtgaataagcggaggagcccggggcggaatggggagggcgaggccgcggacagccgtgtgcaccgtgcgctgggccgggcggggagcagctgaggccacgttgggggaccccgggcccggggcagggctctgggagagtggcctagccgtgtgtgcgcccctagcccagcggcttcactccctcccgagggccccgtggccgcggctttaggcgtccagaggatcgatcgccgccagacatccctggccgtgattgcccgagcacttgaccgcgagggatgggggcgccgcggcctctgggcaggggactccgggcgccccgagggagcagccgggaccagtgcctcgcggacggattgtgccccgctcccccaagggggacccgcgtcgacacgctcctcggtcaccgtcctcctcctgcccgggcgccgcctgcctaaggtggccccagaaagcacaaacgggtcgggcggatctgccgctggcgccggcgcagcccttcccacgtgctccttccggctgatttatttctccaccacgatgccaggcacgggcaccctgtgccaagcctggttaagcgccaggagtccaaaatgcctgccatagtccctgcgcaaagttcacggcctcgtgccagggacagacagcgccccctccccaccccaacacagggtggtgagtgcgatggcagaaggcgcgtgtcccggcgcccctcctggagtaggagggctaagcctgccctgcggggagaccgaaaggctgggagggacctaggactgtgggggcctggggggagggctgcagaaaccccagagcatggtggcagaggcaggcacagaaagcaggacaaatctcacacctgaccccagcaagcctttcctggcacacctcttgccaaatgctgagcactctggaaacagccagtgcaggcggcctgtcccgcccctgtagctgctgctgggagcctccctcgcctgcgtcctcccagaatctggcctcacttctgcaggcctggggtaacatcttggggtcagcgccccaggagaggaggcgcctggaggcagcagagatgtttatgtaacagcagccaggcagcctggaggagcagattttccatagaaggaagcgcggggctgtgcagctcccaggctgaggactctgcccaccacgacgtcctctgctcctggtgggtgggggtggggtggggcatagggaggcccgaaggcctcaggcctggtgctgatcgggtgcgggtgcgactgcctgtgtgcctccattggcatctctgcctgtgggccccaggccagaagtaatggcccatgtagcccaggcccgggggccagtcctcagcattttgcggaggggcggcctgggaggggaggaggggatccctggatagggggtctcccctggtctgccccagctgtgccgacagcacctccaccttgggcctccatcctctaccagcagagaagagagtggcccattcggtgtccacccgtcaggccacccagcagccaggcacgctcataagcccgcgttacggatggtgcggccgggtgcacaggcccgagggaagcacaggcctcggcctcccagctcccaacccctgcaccacccacagccgggagtaccccatggacagctgtggccgaggagaagccagggatgagggggatgggcctcacctccccaccagcctgggaagggggtaggcccctggcaagtaggtgagaagctttttcattcacaagttgtccgggctccccattcctctttgtcaggccagcgggtgtgggcagtcgggggaggctggggtcctgacacaacaggagtacatctgctggcctagggcctggagaccttctcctacaggtcgggaggcagccctgggcagcgggcattgcggggactaaagagaaacaagagcaggttgtgtgcagggcaccccagccactccagaaacccaatgggagggtgggggctaggaccccaagaagctgaattggggtgcagtgccgccaggcctcccctgtaggagtcactttgggcttcctgtcccaacttgtggtgggagctggggcaaggttccaggggtaccccgaatgaatggggctgttcccaagctggccagggagcctggaagcagatgagatggggccgcagagcctggtttgcggaggggagaggcagacgtgtcctgcagccctctcttcttcagaggccccctgcgggtgctgaggggagagtggcttaggcgttgcaccccaggagactgaactgggtcagttcccccttgtttgctgccagagaaatgggggtaccattgtcagggtgagctaaggaggccctgctgacattggcccaaccaggcccctcctttgcggctgctgtggggactttcgagagcagagcacacccctaagtgcgtggagaggtaagcacagctggtgagcacacggggacagcgacggagctcatggagacccaggtgaccttaaaacaccccagggccggctccggccccagagagatgtggtccgagtagaggggggtcagcagtgacctggtgggtgggtgtatttgaggggtgcctgtgttgaaagctctgcagtagattctaaggagcagccagggctgagactcccggtgctgagcccaaggcccctttccttcctgcaggagttcatcttggctcttgcagcccccatgaccctgtggcgctggggggcggctagcatgatgctccccatttttcaggagggaagctgaggctcagagacatcatgaggatgccagctcaaggcccagccaggccttggtcctcagctgctgtcatccagtagggtaagtgggacccccaggaggtgttgggggacactcctcccctcccccacactcacagtctgttcaccgcccaaggcagcaggctggactcggtgcagggaccatggcttggcgtggccaggttggagtggcccctgggactgaaagcagggggcgtgggggctctgaggcggggccgagtgcggggacgtcctgtggcgggtaccctgctgggtcctgggtgggggccaccaccaggcagctgtgggaacattccagaccacctaggagtagggccccttcaccgtttgaagctgactgtaaaaaacatctgacctgtgtgcaaagctcaagcccagaggcctccagggtgtccagcctccagggtgcctcctacgcagcctccacgtccccatccactgcagcccctgaccatcgggcacaccgtggggccttcgctggccgccgggcctcaggttctgctgcaccaagtgatttttaaagccccatctgcctttctccacttataaagaacttgggacatttcctcgaggttgggcatttttccagatgtggtttcagtgtctcgcttgctacctggtcccctgtgctgggcggtccgctgtgacgcacctggcagtccttgctctaggatggattcgggccggcccttgttctgagaacagagaacggcccttgttctgaggaggctggggtctggaatctgcttcctggtcccctgctgtgtgcagacagccaccgtcacccaggcccaggggtgcctgcaggtgctgggcatctcaccctggcccccacaggggctccccatgccctgcacccctcggtctgtgccggggacttccctgctctgctgttgcaggcctcgtcctttgccgagggggtctctttcccacgtgtccctgagactcctcagccatcccagaggctctcggccgtctgagcacccctgaccatgaagccttcctggcccactctctgtgtgtgaggcagagcccatccctaccattccgacccacaccagaggctccggaaggtttgctgactgacctgtgactgcaagaagctgaaggaatgtgggcgcagacccggcaggggcttttcttggtgcaaagtcaactggctgtccatgcaagcctgctgctgtggccagccctcccgccaggcgcctggtaccctccctggacccagttgccaggacagtgatccccagctgtggccaggactctgcccggggccctgtctactcagtgtctccagtggtccccatgcagaaactgccccccttgctgcccatgaggcatgggatagggtcagcatccgagaggcaggccctgctgttcccctctgcacagaggctgggggagtgagttgcccgggcaagtccccgggcaggcactgggcctcctgagcaggtgagctgagaaggccccagctggtgtaggcctcgagagctgcaggactggccatggggcagacctggcattgtcattctagagctgggcctggggggtggctggtgcagtgcagatctcaggtggaggccacctgcccgtcctttccacgtggctcagggctcagacccacctgcctgtccctggaagcccctagactgctcagagcacagacctcagtgggaaagacagtagataggcctgggtatggtctcccagccctgagaagtggggagcccactcagacctttccaggaccccaggtcccctcagcagcccacagagcgtgggtggagcctgggctggggttgggtcacttgggagccaaaggcccatttctgctgcttccagggagtcccagggagacggcagaggcagtgcctggctggggccctggttggcgtgccgtttgaggggtgcatgcactgggaagttggccaggcctgcccaaatcagggggcttccaggaggagagacatcaggaggatgggcacagaggcggcttagcaccagggctggcacctccaggtaggggctgtggggggctggaccagacagggaggctgtcacgatgcctggctgttggatgggggcacagaggctctgagtggggtggcagagcttggccaccaggtccatctgcaccccccatgccccctcactacccccagacccccatgatcccaaactactcagtcccagggacccctgcagagcctgtggtgggggtgatcttccaccctgcctggcccctgcccacctcacctcagaactttctccaaaaagtaagagccccgggggacgaaacttcgaggctccaccccttgggctctggtacaaaccccgagcctcctccgagggctgagtcactgggaaagccgggatgggctggcccctccccctccctctccttccttcctccttccccctttctcggtctccctctttttctctttgctttacttctctttcttgcctccctctctccctctcttctttcgttcctttcatcttcttcccttcctccgtctttgcctttcttcttttctgagggtaaaaatagctggaaaacccccttaaaaaagtttattttaatcttagagggacaatgttggtgtcccaaagcacagtcctttgccccggaggagccaccggcagagccaggagcccctgaaggactttgaccacaccccccaccccaccccgacctgtgcctggtgccccaagtggagcctgggccatccttgacctcaccgctggggtgatggagaagcagccgcccgaggcgagagtttctcaggtggccggggtttccccccatttgctccagacacatttaaacaagctgagaacttccgtccccccatactcccccccgcggacccccacggaccccctctgcaaatgaacatgggcctggaaatcggggtgtgggttacagagagcacggggaattctgctcgtgaagtaacacggagcacgaacataagcaggtaccgcacatctgcgagctattcgggtctccgggggaaggcaaaaagccccaacaagccttaagtaagaccaggacgcttctatagttttgctttgacagctaaggaaaaaatctgccaaaaaccagaggcgctgctgagtgttggcgtgggaatgctagtttagtcagagccttgctctgggccatttaaataaaaacagacatgttggtggcaaatgccagttgaacacgcaggagagcggtgcttctcgggcccggagaagggtttgcagctgcactctctcttcccttttctcttggcctccccagccttcttatcatcacgatcagcatttcactggtaaacatttggtgcaataattttcaaaaatcagcaagaaaagtctgagcgtttcatgtggctgtgactgcgtggccccagctggaagcatggattcccagcgcctcccagagcctgtctccgagggatactctaatcacttgagggcctttgcacgacataaatcagaccgactatctctagagtggagagggggataaactcacttgtagcaagtgaaggccagaggctgccctgggatggcattgcctgttcccaggggcttgtggtggtgcagcagacatggggacccctgggccccttcccctccttgctggggatgccacacagacccacgttcagggacctgaattcagagcctgccccaggggtggcgaatgtatctgggacactgaggacccccctaccgggtgcatctcatggccttttggtctttttttttgagacggagtctcactttgttgcccaggctggagtgtcatggggcgatctccgctcactaccacctccgcctcccgggttcaagcaattctcctgtctcagcctccgagtagctgggattacaggtatgtgccaccacgccagctaatttttctatttttaatagagatagggtttcaccatgttggtcaggctggtcttgaactcctaacctcgggtgatctgcctgccttggcctcccgaagtgttgggattacaggcgtgagccactgcacctggccagccttttggtcttgaagggtctctgggagggcctcagagaatgtcttggtttcctcactcttgggttcccatcgactgaggtcagggctgggaaggggtgatgagcccaggactcttctggcgagagcgagggtctatgttggggggctcccttctgccacctctccttggtgacatggggctggctggagagtccctccgtgcctgggagttcctcagtgtagggggggaagggggccactgcaatgaatctgacaccagccccctctctctccgccctgctggcagccctcactcatatggggggcgggtctgtcctcctttccccaaagctgggggtcctgagtgtggttggggtaacgtctggtcctccttagaacagtggggcttggaattcattcaagggaagaagagtgaaggaacgcagatgccgactgcatggagcccccccgggctgcagcccctagagcctgggcgctctgtgagccagaaagagaacggctggggagagggctgtgtgaggccctgttcttccaagaccgctgcggaggaccgacggggcccagggaccctgactgaggtgtgccgagcacagcagctctggacaggccgcaccggcctctctgtctgtcatctgtccacctgttggtgggcaggaacagacctgatgctgtaagaagaggcccccaggaccctgcctctcccattggctgagcctggactgtggagccagccgccctcacactgggcacagatgaccgacttaggttttgagaagatccaaacagcagcaggacgtgcacctggtaggggtaggagggcctcccctggactcaaaagtgtattcgcggagccccttccctgcagcgtaggctctggggggacagtggccaggacggaggccctcgtggaaagggggagatgtgaacagtgagcctcctgcatgcaggcatctgggaaagaacattccagccaagtggctctgagcacaccccgaccctggccaccctggccctgtggaccaaccctggggcccaggattaatgacagccagtgctcgctggtgcctccagcctgggccaggcctgtgggctggtcccttcaatgatggggcaagctcagccccgtccacacccttctcctcctcctctgtgcttccctccacccccaggagtgggctccaggtctgtcactcgtcactcatggggggctgtgggttgactcgtattcccccaaaagactcgctgtatacccccagagcttgtgagcaggacctgttttggagatgggtctttgcagatgtcgtcgagttaagacaaggccatgctggagtggggcctgccctaatccaacgactggggcccttggcaggagagggaggtttggggagaaggcgctgggaagacaggcagaggctggagacagtgcagccccaagctgggagcacaggggttgccggcacccaacagaagctggaggaggtgggaaggatcctccctagagccttgggagggggcccggtcctgtgacacccagattttggatttctggccttcggaactgagagagcacacatttctgcggtttgaagccaccaaatttttggtaatttgttctggccaggaaattaataccagggataaaggtgttttaatgcagacaaagacagtttttgaattaaccaagctttgcgcaaggctgccgggattgactgggggaagtgagggactcagcagcttccccgacgctcgccaggcaccggcctccatacacgcttgctggcggtggctacggcaggtcgctcttcaggtgaaaccacataatgagcagccttaagcctgtcgatttacacagcagaggctgcctggcctggcgctcttcctggctggaggactctgccttccccctctgcctgcctgtggccactccggctgcagaggagactggcagacgacgttctcatccctggtcggggcaaaagttctgctcaaatatgacaacggtgaaactcggaatagcgacagagccaacccatgattgaggcagggctggaggctttctggaaaacgcacggagaaacacgagggcccagctgtgccctgggccgccccatgagtccagccttcttcgtcctagtcccttctccaaagaaaggacaaaaccactgaaagggttcgtctgggtcacaaacgtcccaaattggcttccgcgtggaaactaaacaagggtaggtcccagcccctgggattcaggtgaaacccgaggcctgtctgaggtcacagcgtcttcccgaggacgtcagccctgttggctgtgtctggggccaggctgaggcatagcgggccaggaggccgagcttcccaaaggagctgcactgtcttttccttagaatatgaaatcaatgtctgccaccttgaatcctcatggacaagactccttggaagccagcctgtgtcagggccagcgtcccccagggctgacacctacaccctcgcattctcagcgtgactcgggacagtggcagaacccgctgggttctctctacgggagtgctttttttttttcttttcttttttttttttttttttttttttgagtcggagtttcactcttgttgcccaggctggagtacaatggtgtgatctcggctcactgcaacctccacctcctgggttcaagcagttctcctgtctcagcctcccgagtagctgggattacaggtgcacaccaccatgcctggctaatttttgtatttttagtagagatgaggtttcacggtgttggccaagctggtctcgaactcct

SEQ ID NO: 42 - DNA, 3286 bp, Homo Sapiens
agaacccgcggctaaccccagaggactggtgagggctggcttgggatgaataaacactcgacacctgacggtcctttctctgcggtgactttcaccaagccgaagtggcgcgcgcgcgggcaggcgggagccgggacctggcccgcgcggcgccgcgcacccggatcccgaggctacgccggcgagcgcggcgcggggggcggggagcgggacagcgggaccgcccgggccaagcgattgtttcaaagacattttttatcaagacccttttgtattcgagccctacctctttttggcctaggaaagctttcgtgcaagtggaagacgactttctccacaaagtgctgtatgttactgtgctccggaccgcgtacgaacaccatccagtcgtgggtgaagccctccacggtgggttttttcctcacctgggcgcggtgccccagctccagcttcacctgcacggcacactgcgggcagggggaggagagacagccgtgaataacaggaaggcgaggtttcggcagtgaacgttgcgcctgacatttttttcctccttcttgaaacgcacataaaaggaaacggcggtgccctctgcatccacgtttcacgcgcgtgggcgcgcacactccacacccccaaatatacccgcccgcccggcccggcttggccccaggcgccccgggccccgcatctacatcggacaggattgtaacggaatgttatccccagtcgggaagggggtcggggaaaagagggagaacacactcagccacgacaagcacgacaacaaatgcatcggaaacaaatcagaaggcgatgccggggcggtttcccggcgtgggaggggaggtggctgggacccagggggaccgaagggctcctggcgagccccctccccgaaagtaccgcggcgacaggcacacgccgaggaagtctttgtgtacgtgtgtgtgcgtgcgtgtggagcgctgtgccaggcgaaatggaaactacaggcagcctctgctgatgggcacaaactcccgtgctcttgccacggggttcgtgcacaacaaaaatgagacgtcgtcatacacactgaaacacacacacacgcccgcaggaaaacacgccgaggcatccataacttagagcaccccgcaccccccagcgaaaagccccacgcgatcggcgaggccagtcgaaccgagcccccgcaacacactttcaagagcccaagtggctccaaagtatctcccacctccccccaaaaaatgaaattcagaaaggcagggcggcgggcggacagccgccgagcctcggctcgcgctcagcacctcccggcgctggggcaaagttgcgtgcggccccgccgctgtcagccccgcacacttcggctcacacacgcgcgccgcggagaacgcaccatcgtagcggccgcggcgctttgcggaggtgcggccgccgaggctgctcgccgcgtccccggactgtgcccgcagctcccggcggcggcggctgaaatatggctgagttattattcgcctccttccaccgtgtgtgtgtgtgtgtgtgagtgcgcgcgtgtgagcgagagggagtgtgtgagtgcgcttcttgtgactgcaaagaggcgaggagggagggaggcgcggggggtggaggggcgagtgtgagcgtgtgtgagtgtgtgtgtgtctgtgtgtctgtgtgcgcgccgggggggggtgggggaggaggggagcggaggctgagggagaggcggcagctccctgcaagccgtaccaacctttctctaattggaaccgcggagcgctggcgctgtctgggctgcggcggcgcagggcgaggaaggaaagtgggggagggcttttattattatttttgcgcgtacttaccgagctagccatgcctgggggcccggaggtttgctggggtgttgtgtggtacccccccctcctccgccccccctcagctgtaattcatgaagaggctgctatgaatgagagcgcgcccaggagcggagggtagatggcggacattctctgcctttttccccccgcgctcgcttgctcgctcgctcgcttattaaactcagccccaaaagcaaaagcagcagcagcagcagcagctccagggtaaagaagatgattgcggagcatgcgccgtggcgcctgacacccgggctccgagcctcacagggcggagggagggcttgcgggcggggcggagcgcgcggggaggcagagcgagcgagccagggggagctcgaaagagccaatcacctgccacctcccgaaaccccggcggcccgcagcgccacactggaaagcctcgcttaaagtaacaggttcctgctgggggggtggcagggaggggacgcaggagtggggagagcggccagctggggagccatcccagcccctgtgtaaactctgctcgccctacaataaaaaacggattaaaactgctggaatgtagccactgcttagagccctcagcagccggagagggggtgttaaatcaagtccttagctagtacgcacggggaggagggagtgggctttcttttactttccaccacgtatttctgtggttttgtgctgaaaagacaagaactcacacccaaacaaacttacttaaagagagcgagagaaatgccatcctgcaaaaaacgagcatgaaaatagcaatgactgaggctgttctaacccgcaacgatcccctggccccctgccccatccactcacaggcacccgcccgccaccctcactccccgcccttctgccaccgccaccgaaaatttgaaaatgaaatgaacaagggagaaacaaggatgctatttccttgcaagggaacgccttccgctttggtaatccccggctgggaagcttcataaagcggtgcccaggtgaaagcaagacacctgggagtgccgggtacagaccctcggggaccaggcttggagttgttttcttcggggggcttcccctcctgacagcctactgagttgcatcagaacgtggaggattgtcctctgaggacgcgcggggcaaccgggagtcttaaaatagcagataaagttaatactgactgtaatgtgcgtaaattggattataatctttaggcgtattggtgacaaccagcgtaatccatctctgagtattaatccggttagactcccgggtgacagccagtcgcaggagtgttcccagagtcgcgcctctgcaaatgttctcactcgcgttgtatttgatctcagtggccggagatagaacagcgcggccacgcgtggggcgcggagagg

SEQ ID NO: 43 - DNA, 23717 bp, Homo Sapiens
tccctgctgcggcatctcagcatgacggaggcccatccttggctttcctggagcatgaatatcctctgaggagcactggccctggccttgtaggtcttgctgagactggcttagattttctggcccaggagcaatcgtcacccaacctcccacttgtaaatctcgccacagaatcggcccacaaccgtctctccggaatctcggcggaccagccctgctcctgtgtctccctctcccgcagagccactgccttctcaggctcctcaagtgcacctaagagcgggagtctggctgccctcagcactcgcgtcccgccctgcagcctgataagcttgacgccaaggcattctcccgagagccggcccagcagctgctggcaggagagtggcctcagggcagcgggaaggggacctccggggagagaatgaggcctgcgcaagggtcctggaaggacccaggagtcgccccggcttccctcccccaggccctggttgggcgccgtgggccgcgtcccagttgagcccggcgtggccgtttaatggcgtccctccgcgaccgaggacgaaggggcctagagaggctgtgcccaagcgacgctgcgaggccaggccgcgtctcgggccagggcggtccccttgccaccgccgctcttggccgccaggaccaagcacagcacgcagcgtcgcgaaaggggcggtcctggaaggcgcgaaggggtctccgggtctcgcgaacacggcggggtcggggcggagtcgtgggtcctcggtcgagcggccgcccagagccccgcgggacacggacggccccagcccggctccccgcgagccccacgcgtctgtgacgccgctgatgcgcagacgccgcggctgcaggccccgcccctccgtgcccctcgcaaggccctctgggagttgtagttccagctcctcctcgggccgccccactccctgataatcctggagcgcggcgcctcccggggaccgaggcctcgggcccggccgtctccagcagcgagggcaggagaagtggcccgggcggtcggcggactgggagggcgccacccgaggactacaactcccggcctgcctcgcgcaggcaccgccccgagcttccgccccgtcggcgccgcgcagccctgtgggagccgtagtccgggcgcgcgattcacagcgccgcgtgcgccccgggcgcgccgtagccgcggggcccgggccgggcgctacgctacgaaggcagcgtaaggcgggcgccggacgcgggcaggggccggggccggagccgggtcggggcgccccgcggctgaggagcgggaggccgtccgggcagcgcggccggcggcgagaggggccccgccgctctccggaggcagaagttgtggatcggccggcgggggcgagcgggcccgggggccggggccgcgctgcccgggccgcgaggacgaggcggcgccgccgggctgtggaggtgagtcccgtcggccgggcccggccgggcgcccagccggggaccccgggcggggagcgcgggcccggagggcggcggggagcgcgggctcggcggggcgcaggaggcctcgggggccgggcgcgccgggctccgagccagggcagggacggcagggcccccggagtggggtcagcccgccgcccgctggcgcctccaggctggtgggggccagggctgggcgatgcttcgcagaggaacccagaggaaggcgggaagtcggcagggacctgggccatgtgggtcacttgaggccagccccgggggccgcgcacaccggaggcggcctcggccctgcctgcccttgagtgcccttatatccgggcccatcgtgcggtcctggccgccttagggatgttgtgcttggtgcgggcatcactcccctcacttggggaacggcctgggggcggccacctggcgtggaggggctggcgggagccccgtctgtgccagccatgccagtgttctcttccgtgttcctctggggctgctgcggcaccagctgggaagttgcaaatctgctgtcctcccgctggctgcagaaggggcccctctagtcctgaccgggggaactcttgtgtggtcagctggccctggccgggcgagctctcggggcccccttactgctctggagtttgttaccggactgcaggtaacaagacccggaaagcaatggtgaggcccagaacctgaggccaggcctgggtgtgtggggccagtggggaagactgggactccgttgggtgctgaagagttgtgtgcttctccttcgggaaacccggatctcttcctctgcccaggtctgaggggtgcggaaacgtgagtcacagttcagtgtgggagtgccccgtaattgcctccgcgtttccagagtctggggctgggcaaggatataggggtgattctcccttccggttctgagtgacttctcaactgtgaagtggggcaagagaaattgtttttctggcctgtctgggggaggcaggtcctgcaggaaaccagcttggcctggccttgggttgggtgtgccttgcctcctccgaggtccttctgcttgcgggaggagcacccctctttttcctgcttctgtctgtgtctgaggctctccagagctccttgattggcagaggagccagtgacctctgagtccccaggagagcccgaggctcagtaactgcataactgcgcagggcctcttgtctgggcctccacagaccgtggtctctgagagcaggaagtggctggtcccctgtaatgctgcatctgtgtgacagcctcaagccctgctggctctctctccgggcacccctcacttgcttcttgccctggccttgggcagcactccggtaaccccagtgccacaggtgaggaaccgaagctggagacagctgttcatggcaggggaggggccgagggaggctgagcgcctggtctctccctcctgctggttccaccagttcacacgaggcaattggagggaaggattctgctgcccggaaaatcctccggaaccacaggtgttgttcatgggcctgagccgctcagtgaagaactcggccgttggtggccgagttgcccctggtccagccctctggcccgcggtgtgatgcctctactcatggcaacaggcgtggacaggtgctgagaaggaggacgacatcattaaacaaaacagcttggggtctttgaaaaacagtgacagaaacccaggaaggctggtgacttgtcaggtctgtgtctgtcctgggtggccactcggccctggaccgtgaggctgaaatgacaggagacacggagggtgggcttgggtggtttcctcataagacacagaagaaggaggcccccaacccgggggctgcctcgtgcgctttgctctcctgttttcctgctctgtccctctggtcctgccctctgacccctggcacagcaggagtgcccagaagcccagtgggacttgttctctgcctaaagcccttccgcatccctcgtacccactcggtgtggatgtgggttttctcaccaccaggctgtgcctcagctgtgtggagccactggcctctcatgccccacgctggagagaacgctgaggtctgtgcggttctcatgtgaccctgtagctggtccctggctccccactgtgggatctgcctgcagcacttacacttgggaccgccctgtctccctgctggatgtggcgccgagggcagggtccgtttctgtttcttggtaggcctagtgtctagcgctatgcagccgtgcgcagagcaggcggtcagtgagcacctggggttggccctcaccacaggcagttctgaatacctgggttctggcagcccagggggactcctgcgtgctccaggaaagtagcacagcagcccctgtggcgtggacacggccacacctgagctcggcctgtttctgagtctgagagaacaggcttgctggcctgtgatctttgcatgtgtgtctcgctgcagggaggctgtgggttggggctggacctagacccgttcagccacaccctgtcactatgtgggtcacacacagctgggtggagacctcccggtgcgtggcccagggaggtgtctgggcgtggagtctgtggacagccacattgtaccactaggacaggggctgctgctgggcccacagggtgcacggaatggggtctgtgggaggatgggggcatcctagcccagggcagggaccccgtgggccccccaagatgagctgcgtcaggctgttgctttgcacactctgaggggcctgcctgagtgctgcatgggaagccagcagtgtggccgccctccccagaactcatccagggcaccagggtggacccatgagtcccgtcgggtcatgggcatcagcctcgccatcctggcctccagatacaacgatttgtcagattccctgaggtcaaagggaagcttcaagggttgccatccccgcctccctggcggtcctagacgggatgtcaggaggacgcagggccatcgctgctttttaaatgtcacagtgactgcagcgtctgctcctctgtggaaggagcttgctccgctaatgagggagttcctcctcatggccttcccctcacttctcttcaaaaagttgccctttattttaacattttttaagttttatttttttgagccagggtcgtgctctgttgcccacgctggagtgcagttgcaatcatagctcgctgcagcctcaaactcctgggctcaagtgatcttcctgcctcagcctcccaaatactgggactacaggtgggcgccaccacacccagcctctgccctttgtaagtgaagtcccccaggcaggttgaacctcttacaccttctgcccctgcctgatccccactccctaccccccacctccctgtcccctgtaatgagaaaggcaataagttttggagctttctggagttcctgcccctcctgaaaaggtggctgcagagaggctggagctgatggggaaagaggtgccacgaggcctcctctgggttagggccacacggctcccaaggcccccgtctccttctctggggtgacaggtgcccccagggccacacggctcccaaggcctccgtctccctctctggggtgacaggtgcccccagggccacacggctcccaaggcctccgtctccttctctgggatgacaggtgcccagggccacacggctcccaaggcccccgtccccttctctggggtgacaggtgccccctgtgtcccagaggcttctgcttggccaccagtgaggtcaccgggctgcccagaccagggctgcttctgccaccacatggcaagcagagaagtagagaagtgccaaaaaccacgagtgcttgtctggtccttttttcctgttaaaaatagaagtcggggctgggtgcggtggctgacacctgtaatcccagccctttcagaggccgaggcaggtgggttgcctgaggtcaggagttcgagaccagcctgaccaaaatggcgaaaccccatctctactaaaaataaaaaaattagctgggtgtggtggtgtgtgcctgtaatcccagatactcaggaggctgagactgtagaattgcttgaacctgggaggcggaggttgcagttagccgggatggcaccactgcactccagcctaggcgacagagctatactccgtctcaaaaaaaaaaaaaagaaaaaaaagtagaattcggttgggctcagtggctcatgcgtgtaatcctagcactttggaaggccaaggtgggtgaatcacatgaggtcaggaggtagagaccagcatggccaacgtgacgaaacccccatctctactaaaaatacaaaaattagctgggcgtggtggtgtgtgcctgtaatcccagatgtttgggaggctgagacactagaattgcttgaacccgggaggcagaggttgcagtgagtcgagatggcaccactgcactccagcctaggtgacagagtgataccctgtctcaaaaaaaaaaaaaaagccagccgctgtggctcacgcctgtaatcccagcactttgggaggtcaaggcgggtggatcacctgaggtcaggagattgagaccatcctggctaacacggtgaaactccatctctgctaaaaatacaaaaaaattagccgggcctggtggcaggcgcctgtagtcccagctactcgggaggctgaggcaggagaatggcgtgaacccaggaggtggagcttgcagtgagccgagatcacaccactgcactccagcctgggcaacagagcgagactctgtcagagaaaaaaaaaaaaaaaacaggtgatgcctgtgccactggacacacctgcacaccatcctcatgctgatcacaaaagagggtgaggggccgggcatggtggctcatgcctggaatcccagcactgggggaggccgaggcgggtggatcacctgaggtctggagttcgagaccagcctgaccaacatggtgaaacctcgtctttactaaaaatacaaaaattagctgggcacggtggcgggcgcctgtaatccgagctacttgggaggctgaggcaggagaatagcttgaacctgggaggcggaggctgcagtgagctgagattgcaccactgcaccccagcctgggtgacagagcgaggctctatctcaaaaaataaaataaaaaatttaaaaccaacaaaaaagagggtgatggctgagtgaggagtccatggtgggccctacacagggcccaggaaggacagggcgggaagcgtgagcatcctgcccaccgcagtgggtccgccatggagagcatgaccttagagaagcaaagccgcctggctcgaagcagtggccgccctgctgacagctgtagtggccgggtggcactcgggctggggtccgggggagtctaggtggccacctggctgtgtgcctgtgcctgcccaagctgggcacctttccctggcagtgcctgggaagctcggccgccctccctggctggtgctgctctgcagccccgctcatggactcttgcccacggcctgctccttgtagcagggtcgggccgtgggaggtccggacaggatcttgaatggccctgtctgcggtcctggctggccggaggttgaccgcactggacaggtcaagggccttaaaccagggtagtgaggagcctgctgagcccctgctgctccccgggctgcctttggcgctcggacagacacccaaggacagaagctcggacagcttctaaggcgaagggtctcccggggctgatttcccgggactctggctcctgcagagagggctggaggcggggctctgtgttccagggtcagagtcctcctggtggaagctgaggtgcctgattaaatgcctccctttctaggcagcagcccagacgcggcacagagagggcctgggagcttgctgcagcttcaggtgagtttgttcccaagccctgcggctcgtttatgggtttgcttgcgctgcagaactgtttgtggagcagcagggttggagtgcccacggctggggggcctctcggagcccttgattcacagaacccctggaggccggcagccctgcctgccctgaagagcctcgttctcccagccgtttgggccgtggtcctgtcgtgggaggcgacggtgagggcggcccggggtcccgacaggggtgtttgtccctttggggacctcccctgtgctgtggccccggcccccagatggagctccccatccccacggcagcgctggggctggggctggtgaggagcctgtgcacggcccccaccgctatcctcagccaggagggtgcctggtccctggggagcggcctgcacctgtttctggagaatgctgtcctgccagttgtcatttggggcgggcggtcggagtccacgtcctcccccagggcggggccctggccttgtttcttgtagggacgatgggaagccctgtcctcagccctcccacccgactcatgcaggagcttcctgtccttggggtcatctcctccacaggggccttagcgtcagtggggacaaaggcagagttgcctgtcttcaggttgtgggcaccgactgagcttcgtcccggtagtggctggctcttgtttcctgcctggaccagcagcctctggtctggtgggtgcagttttagggcgcagtggggttgccgtggggcaaggccaggccaccagctgcctggacacaggggcccccgctttccatctgctgccccccacacccccagctcgggcaggggtgacaccggggcatccttgttggggtcgctgtggttcccatggtggcaagatggctctgtgaaagattgacggagatgtagggcccaggagcaggtgctgtgtgagtgggacacgcctgtgtcacctgcggggcaggggagggctcgggggtacagccgtgtacatgattagttagcgagacagtgaggagtgtatgcggagtggacacagctgtgggtgccgcccgcgcaaggctgggggtcgctgtgccagccctgctcccatgtgggctcccagctccccaggtagggacgctgaccccgggaggtgcctttgcctgcatccactggagcctcaggagcatgcgttccgtccccacgggtcacccccactgagcccaccacctaccgagaggcacctcgagaccctgtcctgccacgggtgggctgtcaaggccagcaccagagacccccagcagacctcagtggccgcagatggagcggggcggcaatggtcacctccgggactcagccctgtgctgagccccgggcagtgtgatcatcctggcccttctcgtgcacgtcccctggctggatgctccttgctgccctcacggggtgtgtgtgtggcatacaggacagggaccggccagttggccctgctcattaaccacttgtccccacagggcagtggcggcctcacctctgcaattctctgaggctggatctaggccaccgccccgtttaaaactagggcatcggctcccagggagggcggggagctgcacagttggacttgtgggggtcaggcatggatccacacagcccggggccctccgcaccctgcccctccagggagcccagaggcgggcgtggctgcagcctggctctgtggcagtcatgagtcacggccactcttgaggcgccgccctgagagtcagccctgtggtcacggctcctgctggttcccattcgcgagcacctgaaacagcctggcccacagcagaggcccggggggcacatgcagctcacgggagcagcacagatgcttggccggcggcaggccctacaggagcagcagcggcccagggcatgtccctggggtcaggggtcagagttcggcatgctctgcgggggcctcaccctgctgtccctcggcctggcctgggcacactccttggtgacagtgcccctgcacgcccccccccccccccggttattcagacagggagccaggatgggaaccacggactgacctgacctgcgtcctcggggccactgcactgggtgattcacgtgtgcccaggccctgaggtgggccggacctgggagtggcaggtgagcgttcctcccaagagcctctggctggccgcagcaggccctgtccctgctgtcctcagtggccctggacatgataacccccctgccgaggtctggccggagccagcacccacggccgagatgcagtcagccctggctgggcgctgtccctgggggtggctgctggtgctgccctccctccttcccaccacttcttgctcctctttcctggggccctcccatcggagtcttcctcctaaatgcagttccctccctctaggggaacgcgggctgggagcctattttttttttttttgagacggagtctcgctctgtcgccccggctggagtgcagtggcgcggtctcggctcactgcaacctccgcctcccggattcaggccattctcctgcctcagcctcccaagtagctgggattacaggcgcccgccaccacgcccagctaattttttgtgtgtttttagtagaaacagggtttctccatcttgcgcaggctagtcttgaactcctgacctcgtgatccacccacctcggcctcccacagtgctgggattacaggcgtgagccactgcacctggcctgggagccttttccgtagctgctcatcctgtactagcatctgtccatcatgagtggacggaacacagggggacccaggacccacagctgcactcgggaaggccagcagggtggatttcgggaagagcatcggtgccagtttcccacagtcacccttgcgatgggaccctcaggttggcacgtggctggcagctgtgtcccgggagctcttgctccttagtgggcctcgccagccagggcagggcccccggcacccctcacggggctcttgactcctctggcagcggatcggggcggttcagcgataccatctctggagatcccctggcgtgtgctggaaaaaccccggagagggcttaacagagccagctgtccagcctctgtgacagggacgtttgcttttctctgcagggtcctctcttctcttccgagcacccacgggaggggactgtgctgtccctgctctcctaggacaggcctccctcctgtccagatggggcccacagggtcagttgcctgagactggctccagctcaagaaaggttttctgagtgagcgcaggggagcaggaggctggtgagcagctcgcttcctgccctgggtgcagctgggcaccacttctgccttgggcctaaaggcatcagtgaggagcaggcggggcctggtaggagcctgtgtttctagcggcacgcgtgaccccaggtgccacgtgggtgagtgcgtgggtgggtgagtggcgaaggagctgaggttggccctggcaggtgtgcagtcctcacacagaacgggcagggctcctgtcagagccaaaccagctcagggcccagtgcaagcagcttctgtcccgtggcacctccgctagtcgccgctcccacccaagccctgccccgccctgacccgctcagggtttggctacagaaggggagtgtcggaaatgcccaacccgtctcccgtgagggactcctgcgtggcctgggctggggaacgcaggggccgtttgggtggttccggcgtctggcgtagccacgcgagaggccctgggttgatgcgtgggctccctgctagcgagcctgctccgtgcgtgctgggctcccggccttgcttccgtgtggcattcgagaccccgtggacctcgcctgcgtcctgcatgtttgagcgctgccccttgtggaggccgccagcactggtggctgcagggcctgtagtgtggcacgtccagagacccggcctggagaacgggtcctggatgtctccgtcatgttttacgttcgcttcacacggacgcagcgatgtctcagatacctcggatcacacagagcacgtcgccaaggcttgttttgtctgttcctttccacctgtcttacgtggataccaggagatccgccacgactcccgtggccccgtccacactgcgcggcgctctccggcgtggccgccaggtgccccttcgagggcaggtgtgagtacagggtggtccctgtggagaagcgcctgcaggcgagtgagccaggctgtgccctgctgaccccgaggcctgaatttcatggaactcccacctctcacagagtattgtttttttttttgatttttttccaaccatttaaaaatgtaaaagccattgttgacttgcgggctggaccaggcttagggctgggctctggtccgcaccccacactggccccgtgtgtcctgtgaccgttctgcctacggggcaggcctgagccaccacaggatggcagggtctccagggtgcagggcccgcaatgcttcaaccctcccacgaccccagcaccttcagagaaaacggaccctcgtgccgagtgaagtggttcaggcgaacgttatcaccacacgggggactcggcggcttctgccccaggcctcaaaggagaggggatccagaattctctgtctcaccccctcagcccctgcccttgaagcttctgtccccaaggctgtggggaggaaccagggaagggctggcgcgtctgctgtgcgatcccaggtgctcgtgcctcgctgagctcagcccctgtggcctcagagctgcaggcccctcccgggtgtcagagcactgactggaaaggccccccacatccctgccctctgctgctccccatcgtcgcgggggagaagctggaactgcacccccaccccccccagcccgctcacctagggctgcccccaggcctccctgagctccaaaggatatgttctttggtgctttttttttttttggctctgtctcccaggctggaatgcagctgtggtgctcacgccatcctcccacgtcagcctcctgagtagctaggtctacaggtgcacaccaccacacccggatagtgtttagttttctataaagacagggtctcactgtgttgcccaggctggtctcaaactcttgggctcaggtgatcccccacgcacggcagctttgacacttacttgaccctttcctcctaagctctaccctgacgctggctgtgtgtcccagagacttaatcagaagctggaagaagggctgtgacgtgtgtgacagcaggaactgctggtcaacccacagccggccagcctgccgggacgccatcttggccccaatcttggcagggagaggggagtgtatcggactctggggagagcagctgcctgcacgggcagggtcctcccgtctcaggattaacgttctcaactgtatttgatttctcctcagccagagggggtaaggtggccttcccagaagcacaggtgggccgcgtgtcagaggccctggacagcctgtgcctctcccaggcctcccagcaggggtggctctcgcccctctggaggggagaccccaggaaccggcccccgccctcagccatagcctcacagggtccttgtttctcggggcctggctctgtgggtgcacaaggcatggtcgggctcccgtccttctggaagtctccagagtggcatgtgggcagctgtgtgaagcggccccccagatcttcatccagcctggcctgcagcagctccctacgccctctgctacctcccctgcctacctttgggtagacgttctcttgacccttccttctgtgataaagcaaaagcgtgtgatctcttttctcaccaaggaataaaacgtctctgaataccacagacgtgatgccgggcttttgggggccggggggtgtcctagggccccgagggaggagccctgtgggtgccgaagtcgggccgcaggccctgcactgagatgtcccctcagcctaccccaggcggctgggcatgctgggaagtcctcccgggctgtgtgtgtgaatcatgctgtttcttctctattttctctctctgtctgtttatttttgttgtgtgtcactctgcccagccggccgtcctgtctcttccctccatgctccgcttcgcccgctgctggccagaggtgaccaggtccggctctcagcacggccgccggccggggggccatggggagctccgcctcctccctggccgcagagaccgagtcggaccacagcttccccgggggaccgccctacccgggtcccccggcagcggctggctggtgtaggagcggcccaggggggcccgtctggggaggtgccctggtcagccggcagcaccagcccccacggccccgggcccgaaggtaagaggtggggaggggtggccccggagggctcccgggggcagagggcctcgttctcagggtgccccctccttggcagaggtgcttgcagagaagtgggtccctgctccttccagttgtggcagctctcttccccagggtgcaggagctgagcaggtctgagaccccggcctcggcctggctggttggtggtggggatgggggctagtgcgcccaatcccggcggccctgtgtttctcacaggctgtgctgctccacgcagagaagctgttcctgaagcttctttttgggctggggtcgctggcggctgcaggctctgggcatattgcctgctgcccacggtttcaaagctgccagcactcgctgggctccgcctgctgcccccccgggggtcacaggccacatggcttggtggccgaactccacgtgctggctcctcacagctgtcaccatggccttggctacccgctgcgtccctcaggagctgccatcaggttctgaggtgcctggtctggaggcagtccaggtggtgaggtctggactggctggaccccaccgatgctcctgccgtcaccccgtcctggccctcactggaggcagggacactcaggggcccggggcctcggggccagtgctgcagtggccgccgttgctctcacagcgggtccaggcctggcttctgaaggcaatgtgcctgcgtctcacactcaaaagggcctgccaggctgcacctggcggcagctcccacgggggacgatgtcctgctgtctgttggcccccaggtgggagggacgggcgtggagctgcaggcagtgggcaaggccatggcaggtggccaggcctgggaaccagcctccaggtggcatccacgctgaggcctgagctccggccgacaaggactggggatgcaggggattagccaggggctgtgtgggggagccctggagccctgtctgcgagttaccccgatgaacagggagacgcggcagaggcagggccggggaggggccgtgtgggggagccctggagccctgtctgcgagttaccctgatggacagagagacgcggcaaaggcagggccggggaggggccgtgtggggcctggtggtcggcagaggaagggtctgtgctcctcctgcgtgtggtggcaccggagcgcctcccagttcctggtgttaccgcaccagccgcctcccagtgagcatctccacgtgtgccgacaacagctttgttgaggtagaacttaccagactcacctgttaaaagagtgcagtttggtcactcttagtggtttgtagagttgtgcagccgtcattgcaatccagcgttgcagcattccacagcccacagggacccccagccccacagtccagtgttacagcatcccgcagcccagagggaccctcagccccagacggccactgaccggcttcctgtcttggtttgccttgtgcagaaggtgcgtggatgtggggccacaggacgtggctggctgggtttgccttgtgcagaaggtgcgtggatgtggggccacaggacgtggctggctgggtttgccttgtgcagaaggtgcgtggatgtggggccacaggacgtggctggctgggtttgccttgtgcagaaggtgcgtggatgtggggccacaggacgtggctggctgggtttgccttgtgcagaaggtgcgtggacgtggggccacaggacgtggggccccgtgtctggcctcttcactcggcaccgtgccctccagattcatgcacctgcagcccgaggcagtttcattcactgctcctttgcgggatgaaccgcattttatctattcatggacgctaggactgcttccacgtggcttctgtggacaatgctgtgaacattgtttacgaggttttgcgtggacctgttttcatttatcttgcatagatacctaggagtgggattgctggggcgtgtggtgaactttcataatgtcttgaggaactgccaagccatcttccgcagcggctgcattacctagttcccaccggcaacgctggggagggtcctggcgtctccactccctcgacagctcctgccgttgtctgtccttgtgattctggccgtcccagggggtgggagctggtgtccccttggctttgatctgcgtttccctggtggccagccatgtggggcctctctccctgtctcatccacccgtgcctgtctttttttcattcattcacttatttatttatttagagacagggtcttactctgtcacccaggctggagtacagtggtgtgatcacagctcactgcagcttctacttcctgggttcaagagaacctcccatctcagcctcccaagtagctggaactacaggcgtgcaccaccatagctggttaattagaaaaaaaaaatttggccaggcgcagtagctcacgcctgtaatcccagcactttgggaggccgaggcgggtagatcacctgaggtcaggagttcaagaccagcctggccaacatggtgaaaccccatctctactaaaacaaaaattagctgggcgtggtgacgggcacctataatcctagctactagggaggctgaagcaggagaatcgcttgaacttgggaggcggaggttgcagtgagccaagattgcaccactgcactccagtgtgggcgacagagtgagactctgtctcaaaataaaaatacaaaccctgagcttgggagggtccaggctgcaatgagctgcgatcgtgccaccgcactccagcttgggcgacacagtgagacgctagacggtgtctcaaaaaacttaaacagaaaaatgtagaaaggattgtcgttccctttctcgttttccagagggcagaggactctcggcccctgctttttgagcaccaggccgagtttcagacctcgggatggcctctccagtctgcagctcccggcagcctcgggccacactcccgggatccccagggactggcctgggactaccgggggtggcggccgtggctctggctatggggagggaggcagagccgcggggcaggcgtggggtctgctgtgccgggtatgtggggcgtgtgttagactttggacctggcctgcggggtcaggccgtggtgtatgatgacgccacgccgctctttctctttcaccctggcctcctgcctggccctcccctgggtcggcatccctggggccactcctgcccgtgcccgctgctgtggggcctgggctccaggcagctcctgtctgctgctgcaaacaggcccccaaggtgcatggtgaggagacccccaggctagagatgggcgagagcggtgggcgagcagactgcgggaaggcagctgggcctccacacgcggagccctccccaccacgtgcatgcacaggcgacccctgccgtgctccgacggagggcgccgggactggggagggtcagcgcgacagccctggcgtttactgaagagctgcctgcctggctcgctgccctggtggccgctgaattctcccaacgccccaggacagcaggtgctgtggccccatgaccgctcccccacatggatgaaggggtggtgcacaggctggtggagcctgggagagccagggcagcctgcggccatgcggccatgcggccggcgtggggctgaggtccctgtacagctgacagagtgcctggcgccctcaatcagtaagtcatctacgggccgggcaccggcggctcagcacagagaggcaacaagggtagaccccccctggcaaggctgaccggcgccgggctgtggccagaccaggagactgcagcccagctcgagggaggcaccacgcctgcccctcagagcactgagcagagccccccatggtatcccccgccctgggcacagcaggaggagctgccgaccaagtctggcaccccggtgtgccccgagagctgtctgggcacaggttgcggggctgccccggccggacggggcatctgtgtttctcggtgtggcctcagggctctggtggctttgaccgaggccccgggggacagaatgcagcttcctgctcctcacttttcctaagaaaggggccgcctcccaggactggggctgcgccagtcacaggcccgcggcctccacgctccgggtgctgctgtcccggctgcttcagggcgggctctgtcttgcacgcagcgagcggcttcatcacctcccttttgaattggagctgagtgtcggcaacgcccagataactggggcgcgcgggtcttttgtgctggatttttctgtacagttgcctcgatcttccatccagcttggcctctgtgcagtaaggagcggcccgtcgcctcccccacgtcgcctcccccacgtcgcctcccccacgtcgcctcccccacgtcgtcgcctcccccacgtcgcctcccccacgtcgtctcccccacgtcgtcgtctcccccacgtcgcctcccccacgtcgcctcccccacgtcgcctcccccacgtcgcctcccccacgtcgcctcccctcacgtcgtcgtctccccccacgtcgtcgtctcccctcacgtcgtctgccctgagcccgctcccttcgaaggtaaccatcctgcagtagtgagggctccttgctgagcacgtgtggctgcgacttcaggagcgttctgggttgagaattccaaaagggcttcgctcaggcctggctttgggtctttgggctcctgacgcgagcttttacttccaggctttggcggtctggcctcaggaggtcaaggctgcagtgagccgtgcgcgagccactgcaccatcctgggcaatcagaccccatctctaaagttcaaaacaacatctttgtaagggtttcgggtctctgagcccatgaacctgcccaggccctgcagaggtgagggtggccctagagtggctggggggttgtggagaccagaaccagggcagaagggcagggagggtgggggccctgccgaggtctcccaccgctgacccctgacccctggcccccttccacctcggcccaccgagagaggccggcacagcgcagactgcggggtcagtgacactcccctcagcgtctccagccacagaagggccgtggcctgccttcgccctcctcacccgtgtcccggggccacgtttgaactttaggccttgttctgacttcattgaaaccctcctgaagtgcagacgtcttcctgacccacctgggttttgccaggatgactccgaaaggtgtctcccagcagacacaccccgctggcgattgtttggtcctggggacccgggttctcattctcctctctggagctggtgaggctgtccttgctagtcggtgacaactacagggccaaagggagggtgtgtcccaggaggcccagcccacctctgcctgcacctgcggtcagcggggtgcagagtctgtgaaggcacctcccggagtgggggctgcaaagatcatggccactgtgccacccacaggggcccaggccggacgcctgggctgtgccgcctcggcagccaggccgaggaacgtgcaggtgcggccgggagcccgccggccacagctgcatccatgcccttctccgagtggtgatggcggggagaggcctggctgtctacgggcagattgcttgggctttcacagaagcccgctgttagagcagattcccggccttgggtctctctgctccagctggacgccctgagcctcgccgggcccagtccacccccgtccactctgccaggggcagctcagagccctcgccacgcggggctgagcgcagggaaggcagcatcacggagttcgctcggctccacagaacacccgtgttgctcgcggagactttttgtttttgtgcttcttatgaagaggcaggttttctttcttcctgaaccaaaagggtttagatggagcacaagattcaggccatatttacaagaacaattgatttttctgccaggcagagcagccagtctgtctcggaggctgtgctgtggtgtggggaggccccttgctcagatcagcctgtgccttccccaggccccggcccatgcacctgcccttccgtaggtctgagcacctgttcttccacgcccaggacgacctggtcctgagtttggccgggaccccctgctatctgccgtccacaggcctggtgacagagaaagcagtgccctggaacagcagcccggctgtggggtgctcagccctctctgtaggatcctgtgtggctcaaggggtctgctgagcctccaacgggcaagaggggccctgagccatggatccattctgggtggaggcagcccccaccgccgcctgcctcaaatgctcagccctaggccctcggccccgtagctctgcagccacagacgggtgccttccccaggccgagaggagggtggggtccagccactcaggacctcacagggtggccctgatgagcaccttcccttgcagccacacccactcgcccgggtctatggccacggtcggagagtggtcctgtgtgcgctgcaccttcctgaacccggccggccagcgccagtgctccatctgcgaggctccccggcacaagcccgacctcaaccacatcctgcggctcagcgtggaggagcagaaatggccctgcgcccgctgcaccttccgcaacttcctgggcaaggaggcctgcgaggtgtgcggcttcaccccggagcctgcgcctggggctgccttcctgccagtcctcaacggggtcctccccaagccacccgccatcctgggggagcccaagggcagctgccaggaggaagcaggtccagtgaggactgcggggctggtggccacggagcccgccagggggcagtgcgaggacaaggacgaggaggagaaggaggagcaggaggaggaggagggagcggcggagcccagagggggctgggcgtgtccgcgttgcacgctgcacaacacgcccgtggccagctcctgctccgtctgcgggggcccacgcaggctctcgctgccacggatccctcctgaggccctggtggtcccggaagtggtggccccggccggcttccacgtcgtgcctgccgcgcctccacctggcctccccggggaaggtgccgaggccaaccccccagccaccagccagggcccagctgccgaaccagagccgcccagggtcccgcccttcagccccttctcgtccaccctgcagaacaaccccgtgccgcgcagccgacgcgaggttcccccccagctgcagccaccggtgcctgaggctgcccagccgtcaccctctgccggctgcaggggagccccccagggctcgggctgggctggggcctcccgcctagcagagttgctgtctggcaagcggctgagtgtgctggaggaagaggccacggagggtggcaccagccgcgtagaggccggcagctccacctcgggcagtgacatcattgacctggccggagacaccgtgcgttacacgcccgccagcccctccagccccgacttcaccacctggtcatgtgccaagtgcacgctcagaaaccccacagtggcccccaggtgctcggcctgcggctgctccaaactgcacggcttccaggagcatggcgagccccccacccactgccccgactgtggggccgacaagcccagcccctgcggcagaagctgcggacgggtgtcctcggcccagaaggccgcccgcgtcctgcccgagcgcccgggccagtgggcctgccctgcctgtaccctgctcaacgcactgcgggccaagcactgcgccgcctgccacacgcctcagctcctggtggcccagcggcggggggccgcgcccctgaggcgcagggagagcatgcacgtggagcagcggcggcagacagacgagggcgaggccaaggcactctgggagaacatcgtggccttctgccgggaggtgaggcgccccctcgccctcttcctgctcctgagcctcctgctcccgccctccccttcctaggctttgggctctggcgatgggctggggaggagcccacaaggcctaagacgtgatggggagggcagcaccctccgccccgaggctccaagctcccaatggccctggggtccagcttggcctcctgacccttggtccttgctggtgaccgagatgcacgaccttcacccccctcaaccctccaccgtggccaggagggccccgagccccgtctgatgtgccgcaggaggcgagggcttcccaggggcagcgtggagaccccgctgaagtgcgaggtcgggatgtacccgtgctccgccctctagagtccaggatggcatcacccacgggtcaactggggcgcagcctgcaccctccccagcagggccagggccagagtcgtgctgccacccactgggggctgcgctgtccccctgggcccacacgtcccctgctcctcacctgtcgccagccggtggcctctccactagggctgagggcttcctcgacacagggccggcgccaggtctgtggctgtccacgctccacccgtccctttggggctcaggcagtgcttttgggcgctctcctgggtggggtcttgtccctgccaggtggagcgaggccaccctgcccagcctgagcacatggccgtggtctctgcagaacaatgtgagcttcgtggatgacagcttccctcccgggcccgagtctgtcggcttccccgcgggtgacagcgtgcagcagcgtgtgaggcagtggctgcgaccccaggagatcaactgctccgtcttcagggaccacagggccacgtggtctgtgttccacacactgcggccctcagacatcctgcaggggctgctggggaactgctggtgaggccttctccaaggccggggtggggcgggtgggcgggcgaccggccgcggtccccgcgaggtcaccctgaggctctgcgcaggttcctgagcgccctggcggtgctggcggagcggccggacctggtggagcgggtgatggtcacgcgcagcctgtgtgcagagggcgcctaccaggtgcggctgtgcaaggacggcacgtggaccacggtgctggtggacgacatgctgccctgtgatgaggccggctgcctcctcttctcacaggtggggcggcctgcagggtgggcacgggcggcaggggcagcctctgaccccagccccgaaaacaaggccggctgcttcctcttctcccagggcgggtagtgtggggggcgggcgggggtggcctctgacccggccctctgcaggcgcagcggaagcagctgtgggtggccctcatcgagaaggcgctggccaagctgcacggctcctactttgcgctccaggcgggccgcgccatcgaaggcctggccacgctcaccggcgccccctgtgagagcctggcgctgcagctcagctccactaacccccgcgaggagcccgttgacactgacctcatctgggccaaaatgctgagttctaaggaggctgggtaagaggaggggcactgcgtggtcagccgcgttgggaggagaggcgaggcggagcggtgggagatgtggggctggtggcccctgacccagttctgcttccacgaggtgcccctggcgtgggctgaccccgcgtggccaggccacagccccaatcacctccccctccctgggcggggctggagctggccttctcatgccaggaaggccacatcctggccaggccgtggggcgagaccgatgccgtcaccccggagcaggtgtgagcggcgtgtcgagtttgacctgggccgtggggcgagactgatgccgtcatccgcctcggggcaggcgtgagcggcgtgtcgagtttggccacactctggtcagcgggtctgtgcctcgacccccaggggcctcctcggagtgccccggtgcgagcaccttgaagctcccggagccct

SEQ ID NO: 44 - DNA, 17265 bp, Homo Sapiens
gcaggcggatcacgaggttaggagttcgagaccagcctcaccaacatgctgaaaccccgtctctaccaaaaatacaaaaattagccaggcatggtggcacacgcctgtaatcccagctactcaggaggctgaggcaggacaatcccttgaacccgggaggcggaggttgcagtgagccgagatcgtaccattgcactccagcctgggtgacagaatggaatgagactctgtctcaaaaaaaaaaaaaaaaaaaaagaagccctagatttcggttgtgttggttgtaaaaggagagacccagtaagtgggggttgtgccgcagattgctacccacaatggacgggtcactgagcaggtccggccaactgggcgttccctcgctggagggccagcacaccagactgcaggtggcgcgggtcagcaaggtaccaggggatgtgtcacacacacagcccacccccgtccagtcacgcacggacaccctgggcttccgagcaaacctgctcccacgtggtgtgaccacatggagccacagacacccagcaaggacacgcagcccgcacacccccggtactccagacacagtgacctgcaccagggctcgaggtttctctagggaacccacctcttagaatcatccagaaacaagtcactcttcacctgtccagcaaaggcctgctgagaggtgcacagtgtctggagtccaagctgcgccaaggcggcaggacccccagcccagcccaggacccccagtagagccctcacctcagcgtggaggcctgagaacgtgaggaaggagctgtccagcacggacgagtccaggcagctgtcgatgtccagcacctactgcccggcaggtgtggggctcaggctcccagccacctgcaggacgacggcagtggtcagcgggcggcagctcagacctgctcaggacagggatgagaagccacctcctcagcagacaggacagagcccggtgccatctaacagaatgtcctagaatgctggatatatgggacatctgcaccgtccgtgatggcagcccctcgcgacatgtgccactgaacacttgacagcagactggtgcagctaaggaacagagttttgaatttcattttttttttttttttaagatggagtctcgctctgtcacccaggcaggagtgcactggcgcaatctcagctcactgcaacctccacctcccgcgttcaggcgattgtcctggctcagcctcctgagtagctgggattacaggtgcctgccacgatgcccagctaattttttgtatttttagtagagacggggtttcactgtgttggccaggctggtcttggaactcctgacctcaagtgatctgcccgcctccgcctcccaaagtgctgggattacaggtgtgagccaccacgcccggccatcgttccattttaattaactttaatacgagcagccacatgtggcctctggttcctgccacggactcgggagcaacccctcctggtcgcggcttatgcgccttctctgtgtgctgctggggttagtttgcatgtaacctcttgaggaccccacgtgtgcattcctaaggggtgcggcctcccgtttccgtatgaatgggaagagttcccacctgctgtattcttggaaagagtctgtgaaggattggtgttaattcttccttaactgcttagaaaaattctatcgtgaaggctctgagcccaagcttttctttgtgggattttttttttcttttttttggagatggagtcttgctccattgcccaggatggagtgcagtggcgcaatctcggctcactgcaagctccgcctcctgggttcatgccattctcctgcctcagcctctcgagtagctgggactacaggcgcccgccaccatgcccagctaagtttttgtatttgtagtagagacagggtttcattgtgttggccaggctggtctcgaactcctgacctcaactgatctgcccgcctcggcctcccaaagtgttgggattacaggcgtgagccaccgtgcctggccctttttaatgttttatatagatggggtcttgctatgttgcccaggctggtctcaaactcctggactcagatccgcccacctcggcctcctgaagtgttgggattacaggcgtgagccaccacacccggcccggccactgggaggtttctaagggactaactcggcctcttcacttgctatagatgtactgagattttcttctggagtgcatttcggaagcgtgcacagccgcgtgcttgcttcttctgagttatctggcgtgctgctgtgcagttgtccgtggcgtctgcttagcgaagtgccctcgttctttcacgattctggcttctgagtcttctctctttctccctggtcagtctagctaaggctgctcaagtgtgttgacccttcccgagcagcctttggtggacgcctttccctctggctgcagcactggaaagtggcggccctgggcatggtgccgaggcccaggctccattcccagtactcccgggtccccagccccagcccaccttgctccgggacatccggaagagaaagaggatggccaggtagacgggatagacaaccacgctggacaccaggccaacagcgactgtgtcgacgctcagcgggctcagcctggacacatgccccgtgctgtgtggaggagaggaggccacacaggtgaggctgaggggcaggaagggctgggcaggaagaggctgtcccgacccctacggcacccacctgtaggcagagtcaccaacagccccgtaccacacggcgttggcgcccaggaagaggcagatgaggagaacgcagcaggtggccctctggatgcgagtgaaacagctacgaggtggccggtcccatatggagagccagatgtgcttgtcaaagaagccacgctgcagctcagccaccagcaggcgccggaagcgcaacagggctgcgtgacctagaaggcagggagggccgcactgcaggaggccacggggcaggaccaccctgcccaacctcccacggagtgggaacatggaacgaggccttactcgcagccagcacctccttctccaccaggcccccgttggcctccgtctccaccgaaagccagtcattgaccaggaagaaggtgctgcgtgccgtctgcaggtccctgacgatgatgtgctgcaggaaccaggcagggctgagccctgcagaggcgcgggagggaggtcaggctcgcagggcgccccaatgcgggggcagaggggcagagcttggcagggtccgcacagacctttgttgtcgtgccacactcggatcttccacacgctacccaggctgtgcggggtggcgatccggaagatgtccagactgttgcggtggaaggctctgtcgccgtccaggtgccggtggccgctccggctgtccaccccatacagcatgatgcccacgtgggccgtggtacctggagggcaagagggaggggtgggaggctcggtctgctgcccaacacgtgtggcatcccaggcaagtcatctcagctttggcctccgcgcactcaaggagccacacaggcagtcccggctttgcacggctctgccatacacgaggagctgcggttactgcaatttgtccaataaacagcaggacctcaaggacatgattaagttacacggaaagaactgtaacttgtgacatgcaaacatggctgcacacgcctcagtccacaccacaaccagtgacccgcgctgcacacctgtccacgcctcagtcacgccacaaccagtgacccgcaccacacacccgtccctcagttcatgcacagactgcgaagcgtgaagctgtgtcacctcctctcccagtgacagacccaggtgacagtattttttttctttttttttttgagatggagtcttgctgtgtcacccaggctggagtgcagtggcgcaatctcagctcactgcaagctccgcctcccgggctcacgccattctcctgcctcagtctcccgaggagctgggactacaggtgcctgccaccacgccgggctaatttttttgtattttttagtagagacagggtttcaccgttagccaggatggtctcggtctcctgaccccgtgatttgcctgcctcggcctcccaaagtgctcggattacaggtgtgagccaccacgcccggccgacagtttttaaaagtaggtaatcaaaagaactgggaaatgaagatgaaagcaacacggaaataaaaaatgggaacacagccaggtgtggtggctcacacctgtcatcccagcactctggcaggccgaggcaggcggatcacctgaggtcaggagttcgcctggctgacatggtgaaaaattaactgggtgtggtggcgtgcacctgtactcccagctactcaggagaatcgcttaaggggaatcgcttaaacccaggagctggaagttgctgtgagccaagatcacgccattgcactccagcctgggcaacagagtgagactccgtctccaaaaaaagaaaaacgaaaacaaaaagggaatgccagaagggcaattccaataaaggaaaatggaggtattgaagaaacagccacggggagggtgctggcacctccgtctgagagacgagctatgcagtcaggatcgcgggtggatgcatggtctcccacagtggtagcgatgctcatgtcacttgtggggccacgctactgtgcagaacgtgggctgcccaccctgactgactggcacctacttccagctaggagctgtcctagtcctcagggacagtgagtgctcacgaggtcattcccaggatgaacacacgagcccttcacacagcactgcaaaaactgccttgttctgacgcctgcgacgagactcactcccagagggtgcaaccagcacagccagtgagagcaggggaggccctgccaccccgccgcgcccctcacctgagccccggccccagcctgtcttgacgaggatctcgtacttgaagcggccccgctgcccacagaaggggatggcgcagccccggctggcatccaactggtccagcttgtgcaggatggcggccatgaccatgtaggtcaccaggcacacagcacatgtcagcatgacgatgtagtttacatccgctgtcggctcctgtgaagacacagccgccgggcccaggaggtcacgtgcaagctgtgccttctcaggatagagccgagcccacccaggccctcctcgactctgcagaggctcccaggagcacagggtcactcacaggaaacacaaagcgtacatggcttgggggcatgaagaggctggcgccgaaggcggtgaggtggcgggtgaggcagacggcctggcggggcgaggtctcctccaggggcagcagcccctctgtccgccacaccacatcctcctcgctgaagtactggcacagggacgtgtacaagcccacggacacctccagcgccgaccagcggaagtggctggagaggttcagacggtaactccccactgggtctctggtcctgggaagggaaggggcagtggacgtgagcccaggctccgccaggttggatgtcggagtcccagagcccatacccggtccagtcccctcgctgcctgccgtccccacggggcccgtaacccgggcaatgctgacccatgatgccctgccctgccctgccaggccggcccgcagagctcaccccggggaaatgaagaaggtgtagggccggtggtcggcaccctggagggactctgggcggatcctcctgctagccgagcagttgcgctcattgggccggggctccgagtgcaggtagactgccaggtagggctcgggttcctcagacaggtagcggcctggggcagaacgcgcaggtcacacgcctgccgggaagctcaaccacccgggggacacccacgatggccctcctgagcccaccctctgccacgggcctgaaaggccataggagcctctgcaccagagctggcacctgcttctccgtggcccccagctcctctccggccaggcccccaacagcccatgaaacagcaaatttcaccagagacacccatggaagccctacgagaaacgccttccccccaagaacaaggccagggggccgcgtgtgccccacccgctgcacacaccgtccagcagcgtatagttgagctgcagatgcagcacggccacagggctgctgctgtccagggtgaccacagcaccgacggaggcctggggctggaccacaacggagttggcggagctgcggtggccccgggcagcccagtccgagttgttgggcaccttcacggtgatggcgcgctctgaggccagccgctcgatggggatctgggcgccggcctgtgtctggaacgccatcgaggccaccttggtggagacggtgtagttgctgatatagccaaagagaaagggattggagtccaccagaaagacgagctgcaccacgtcactgaggttggcgggggccctgctgaaagcctaggggatggagaggtggcagccaggccctggggcgccgccatagcacagcaggctccgcgggtccgagcgcttgccctgggccatgatctcctcgcccgccagcgtcacgggctcctcgttgagcacgcgggagcgcgtgaggatgcgcatgagggcagaggtcaggttgtaggcctgggacgccaccatccgcaatggtgactcggctcccagctctgagcgctgcggtgcccgcacgtctgagctggccaggtggatgaggtctcctgcagacaggcgtgaggtcagtgcagagacagggaggcagagggagggtgggggcaggcaaaaagggggagccggagggtgggggctgggagaaagggggaacctgagggggcagagagcgaggtgcaggcagaaggaagagggaagctggagagagagtggtggagggggagggggaaggggatggggatgaggacgaagatgagggggatgatggggagagggaggaaaaaggaaggaaaagggtagagaaaagagaaaggggagaagaagaggagcagggtgaaagggaggggaaggggataagggggataagggaggggaagggggataagggaggggaaggaggataagggggataagaaagatgaggggaatggacaaaaggacggggaggatcgggggggaaatggagaaaaggggagagagatggagaaaagggatggtaatagggaagggggagggggaggagaatgggaattgggggagggggataaggatgggaattgggggagggggatgaggatgggaattgggggagcgggatgaggatgggaattgggggagcgggatgaggatgggaattgggggagggggatgaggatgggaattggggggaggggagggggacgaagatgggatggggcaaaggcgaggcggttgtggggaggagggaggcagaggaaagggcggcatggggcggacgggccacgtggggcgggcgggtggcgtggggcacgggccgcggcacctgtgatgttgaggatgctgtctccgatggcggtgggcgtcacggtgcccgcggtggtctctgcctgcaggatgcgcatcatggcctccagcttgtgcagcgtctgcttcaggcacgagcggcatacgagctccctgctgggcccctgtgtggagccagcagtgtccagccccgctcctggccccactccttgcacacgccctcctctctacacgggtcctcacctggctcccacccccagccctgcagctggagagcccacttgactggacccccacagcctcctcactaagcattttttgtggctctgcatgacccagggcctccacctggggaacacgtgatgcagcccaccgaccacacaaggcacctcttcacatgagagaaggaggagggcagaagggagagaggagagggaagtggagaaaaggggggagaggagagggaaggagagagaagggggagaggagaggggaggggagagaaggggggagaggagggagggggaggaggggaggaaggaggaggggaggggtgaggggatggaggggctgggggaggagtggaggggctcagcgggatgaggtgaggggaaggtctaggggaggggaggaggggaagggctaggggaggggaggggctgggggaggaggcaggggctaggggaggggggagggactaggggagggaagggggaggggaggggttaggggagggaaggggaggggaggggctaggggagggaagggggaggggaggggagagtggagggcacagagcagcatcttcttagtccctccccacatctgggcccctctttacaccctgggtcccccgagaggcaccctgcgttcacacaggacagcagaatggctgaggctactgaagcaggtcagagaccgaggaacgccatggcaggaaggagcccaggctggaggctcagctcctcggccaagctgcccgtctgccctggggggctgaacccagtaccctggcaggcatgcggggcggggagagcatgtggggccatcctaccatgcactgggccagcgcagcagcgatctgctggatgtcatccacagtgtggaccctcagggacaccagagtctccgtgatgttcttgcgtatctgggctcggcgctgccgctcgtgcttgggctctgccgccacgtccagggcccgctcgtactggggcaggcagggggcacagcaagctgtcagcagggcaggaggccggcaggaggccagcagatgcccacgactcccggggtgcagttacgtgctagatgctgtgtgatgtgggcactgacccgcaacactgagctgtttcttcatgggcaaaacagggtaagcacatgggccctcctgggcgggggctgcattgtggaaagcagacgccggagagggcccggtgggtgtggctgctgggagcggaacgtcggggtgctgcttcagggtcactgggatttatctctggggcccgggatgagccctccgcaaagctccaggcaggggaacaggtcttggtccccagcacgcatgcagcagatgtgaggtcccctcccaggctgcactcacctcgttcagcacagtgaccagggccagcgagtactcgatgacgtgctggggatcggcctgccgcagcagccccgggagcacactagcggtgagcccgtgcagccagactgtgagccccattgcgctgccgttgggctctgggagggtgatggccagagacctacgagcagaggggggtggtgagtaggtggcagtctcgggggcgccctcccacggcctggctcacctgttgagggcgaccacagcggctcccagctggtcctgcaccaccacggccaggcccacctcgaagtgtggcctgaaacccgggggcagcacggctccgtagccggagaggctgcccttgtagacacagaactcctcgcagtggccctggcgacagcgctgcagcagcagggcgtacaccagcggggcgccagcatcctccgcgtcatgccagcctgagggacggtccccacggcatcacgggagggctccgtgacctcacagagtcgggggatcccgctgctccccctacgcaggcctgcactcacccatgcattcgaagtgcaccttggtggtgagagcgtgcacagcgcccagtgggaagaggcggcaagagccccccagcggcgggcggttgggggacagggggatggaggcgcagccctcctccttgccagagcggcccagcaccgtcagcgtgaaggtgtatccctcgccgtcccgcagcacgccccgccgcagcaccagtcacatgcctgcgctgcccgtggatgtggtggtctcatccagcaccagcgtcttgttgctgaacgtacgtgcagcccaccgctgcaggcagaagggatggtgagggggcgcaaccctctgccctgtcagccccacttctgcctgcaggccccgtcccctcggccatgggacccatccccaacccgcccacaccccgctcaacactcacccctcgcttggagccgctgctgcaattgaggcagcggccctccaggtacacgtaggagctgcggctcacttcgtacacggcctgtgccttgcaggacacacactccaaggacacaatgggcacccggccactgcggatcagcacctggcgtgggagtggggttacctccaacacaggtctatttggcctgctggaaggtctgggggacccgtggaggatgctgctcccaaactccaggtttcccaggggcctggccactgccggtgagctcaccccctcccaggatactcatccggtttgccaccttccaacctgggcggcggaagggcatacacagggcagaggacactggggtgtgcgttctggtgtactggagccagctggaccctggcaggaggcaggcaatgctcactgagggcccctggggggatgcgtgtgggaacagacgtatgtgtgggtgtgaggaccgcagttgccacgtaggcctgactcacagactcctgcagcccttagccagggcctgggtcaggaggctgagccgggatggaacctgctcccacaccctcccctcagacgacccctctgggcagacccccaatcaggccagctgaggaaagcagggactggggaacagacacccactctggggtaccagcaggccccagtcagggaggcgcacacgctcacagagggcagggaggcgcacacgctcacaggcacctgctgcgtccggttctcgaaggcattagatgccagcaaggtcaggacgtactcacctgtggggacaggcccaagtggggcagccgcggcacccccacctgctccccacccgctcggcagaagccccccgcctgaggagcccggggtgaacggctgcacctgcggcccagccttaagggtcccaggctcccaagccacgtgcgggacggagcacaggtgcagcagcactgagggctgcctggtgaggacggcaccgcctccaagtgcagctgcactcggggcagcagagcagcaagagccaggccgcggtggggggcagttcagggggcccagcttccctgtccactcctcccacgcctggcccctccctcaccccagtaggggcctaagccatcagcccaggtgaggtcacagtgagggctgttggggaggaagcggggcagcttgactgggggactgggggggccccgtgctcagagcctgaaaggcagtggccccctcaccccctcatccctcacctggggcagcgtaggtgtgggtgacattgtgctccaccagcacctgggccaccgaggggtctggaaccgggaaggactcgttgtacggaggctggaactggtggagggcctgctccccatccccaaaggtccacctgccggggcggtgggaggcagtgagtgaaccgggacaggggtgcgcagtggcggggcacaggtgcgcggtggcggggcagggggtgcttgggacccagccgaggctccactctgcagtcacgccccgggcctccattcagggcccacccggctgtgctgaggcctctcccggctcccgtgcagcctcagggctcctgtgcacccagtacctcccaacagacagggaaaccgaggctcagaaaagcaaccccctgatgtggggtccctcggctgaggctggagccgggacaagagcctggtgcccggacaagagcctggtgcccaccccaaaccggcccctgagtcactcacaggaaggccacctccacggccgagtccaccagcacgcccgccgtcagtgccagcgtggcattgggggacagcacggctggcactgtagagacccgcaggccctgcatcctgttcatccgctccacggtgatgttgtagttcacggtgacgttgctcacgtggttggaggccgtcagctgcagggacaggcatcagtgggcccaggtggcaggtgagaggcctgccctgcttggcgtccctccctccactcaccacagccatggcagcgtcctcgggcagcatgaagcagagcagaaggcagaggtgaaggtggagcccgcccccgccccgccccatcccctcccctccccactcccgcccacctactgagagcttgaagaccgccgcgctctgataaatgacattgaagaccacgttctggaaggtcagggactgcttgtcgttgatggtccaccggaagaccatgtccgagccggcctccaccacggggctgtacctctgcggggggactggtgtcagcctgggctctgtggaggactctgcccttagcctgtcgcctcctggacacacctcccgtcgggctggagagtcccacgcggggcacagaggagaggaggtgcccggggctctgcatgccatgagagccaagcccgggctgggacactgactgtccggctctccagccagccatgtagtactactaatgcctcaacctctctgtgcctcagtttccccatctgtaaagcaaacctagtaccagctacaaagagtccacctctctctgagtcttctcagaccctcccggggctcctgccccagctcctcagccagagagctcggagcagtgaggggaggcacacgggcctcacagggacagcacctacactggcttacagaacccaggacaggctgcacaggtcacgccatttctgatggcccctcccaaggcccctggtgaaggggcaggtacccgcaagatggaacagccctgtcccccatgtacccagcatggtggcactgcgggcagcccgcagtttcccatcaggggttcggactccacctcaaaagccacttgctttagccaggcgagaacacagcagagggcgtgagagactcacggggactcgtgtgaggtcagggagcggagttttaaattcatttcgtgaaatgagacggtggaatgagttagcggagccgctgtcagagccgtgactttccaggaatttaaagcccaccaggtagcctgaggagccagccagcaggacctgcccggggccgacgtccccagtaactgggctgctgccctcactgggaagccaggcctcaagccctgtgtgagcaccctgtctgcaggcacctgcctgggggctggtggtggagcctcggccatactcaccactgggactccctgcagtacacgggcctcggggctgggcgtggcgcggaggccacagatgggctcctccgccgtcacccgcaggctgaggttggcccggctggcgctgttttccaccacaacgtccatcacgtgctccccctcaccgagccacggcagtgctaccactgagaacagggtatcattggtctcccaggggcagccgggcacgaaggtggccaccagggcagggcaggcattctcaaagcgggcgctgacactgcccccaggccagcgagccgtggccgtggcgctggcaccagagtccacctggagcaccgaggctgagccgttggtgggcacgtagaggcggccgtcgcggggggcagggtagatgacccgcagcccagccactggggagaccacgtcaaagctgcaggacaggttgtgcctggacacgccattgcccacctctgcccggacctcatagcgcccaggcagccgcagcccagggttgggcctcaggcccagcagcacggtgagctgttccgtggctgcaagcagccgcagggcacaggcagggcaggcccaagtgccctccagctgggctggcaagtggggcagccatgacgaggcgttggcggagaggtacggggcctggggaccagggtggccgggagccggcgagcagtgcaggagggcgccagggccagcgtcgtgctgcaagccaacgaggtcaccagggagcatgaggacatcctggctgtggagggtgacctgtggagagggaggcagggctgcatcacgtcctcacggtcatggcccgtggacccctgcacgacggatgagggtggacacgcagggctccccgcttcgtcagccacacctcagggagcctccccacagtgctcgtgacaaggacaggcaggacagttgcagacagggggacacacggggagaggacacaggccaagacctggcagacaggaaggagcggctgtgctgggagagaggaagaggaggcacagctcgtgccaagggcccaggcgagagcttctcccactgggagaggggcaagggcactgcagaggtcggaggttggaggtcggaggtcggaggtcagaggtggcaaggacgtgggaggggcctgcaggctgggtgtgcctgctgcgcagacccagaccctgggcagcagacaggaaggtggcctgaggagatgcagggaacagacccaggtcagggccacacaccgagtactgcgcggggggccccgcgggaacggagaagaggaactctctccatagcgcatagggggccccgagtagccctggccctgacgtgcagccattggcgcaggcctgggggtggcaggaggcgtccagcggcaagcagatgttggctccagggcaccagcgtccccctggcatgcacgcggggaccagctgggtcctgttgtccggggacctgctctcaggctcgctgccgttctccggggtccctgcgaggaggggagggtgttggggccctcattcgcccacgggccaccgtcagagatgcccaactgcctgcaccagcgagcctggccttgctgtgaggacaggtctccccgcccgggcagcactcccagcccagtgctgcgtccctgtctccggccagctgactgacccaggccggtccccaggcaggccccacccgatccacccccaggacacctggaatgagctggtgtctctggaacccctgctctgtccacctaagactgggaaccactctgatggccacaggaccagcagacgtgagagctcagagaggccaccccgagtcctgcggcgcccaccaccccagagtcccacctgctgtgctgaggagccggtacacctgcagccgcagctgggcgggccgccggagctcctgggtcccaaattcggccgtggtgaggaaggcttcacggctcagacgcaggcccgggaataccatgacctggtgggcagggggccgcctcagctccacagaccccatcccagcctgaagcccagactccccccacccgaacttcgcaggaagaggggagggaaggagagcgagccatcggacccccacaggcctggctcctgtcgctcgagaggaagactccgatggaaactgtccatggggggcaggacccctgacctgcctttcaggaataactcacccacactcagagaaaaggcctgggggtaatgtgagtaaacgctttcctctctgcactctggattttcccaaccatcttcactgggcacaagcaacattaaggcccccaagttttttggcgagacccacagtgggcagggcaggcgaggcctccaggggcaggcaggagggcaggttatagaacgtggggggccgactacctccacgggctcgtgcggggctgagaggccgtcctgccgtgccagaggcatcaggggtccctacaggtccccactgggcgctcccacgaggaggttctcggcatcctgcactgggcctggggtggcaagtgcacagtgaggcgccgggccagggcccaggacaccaggacgaacagactggggaccgagccgcccgagaacccccccaccagcccctcctcctcagcccaggctccaccgcgggcgctcggcaggcccctaaccacagccagcgtctcaggcccctgcctggcccctcgcacacctccaggccgcagctcgcagacgtagctgtgcggcgctgagcacaggtcggtgttacaccacccggtgggcccgagccggacgcagtgctcggctgtggctgggtgtggctccccgggcagccagttctggcagctctccaggctgaaggcctcgccctgcggcgctgggcccacctccaccccctgcacagtcgagaagccgatccacatgtctaggctcctgggggcgggtgtgggatggcagggggctcagggcactcctccatcctcccaccctcacagcagcccgctgggagccccgtcactgtccccctttccagatggggaaactgaggctcagagcccggagagcagggcccaccagcccaggctcacagcagcacccacccacggggcctgtgggcaccggcagggatccccgtgcaggccacctcccgtatggcgtgcccaggagtgtccggaggctgcccccagctcgcgtccacctctgcatctgcagagctgacaggaacggccccaccggccggcgccacctgctcaccagggccggcccagctcccacctccctcctcctgagactccccagccgcaggctctgccccactgcttcagagatctcccaacctatggcccctcggggggtggggcaggcacctggtgacccgggagaccaggaagcgctgcacggcgggactgtccaccattgccagggtggccccggcccaggcccgacactgctcctgcgcctgcagccaggccgccttctccaccaccaggcggtagcagtgcccattgccagagaagatctccgtgtccgaggggcagagcgggtgcaccgctggagaccagtgggaacgagggtgtcaacggtcagtgtgggcccaagacgggggtaccaggctctgccccatctggatggccctggggaggaaggggagtgggcagcagacactcacctcgggccggctcctcgcccagggccacgatgctgtaggcggcctccaggcctgaaccaccgcggttctggatgctgaggtcgaggctctcgtcactctgcaccgaggacgggcacacgagctccagggcggcaggtgccgcttccacctgcacgtctgtccccagcagggctgagccggtccccagggccagcacggccgtcacgtgatagcgcccaggcagcacatagcgatgcgaggcagccggcccagcggcatccacctcgggggagccgtctccgaagtcccagcgtgtggcagtgacagggagcggggcagcgatgtggaaggctgctagctggccggaggccaggggtccgtggggccccaccagggtggcccctggggaggcagggaagacgtgctggaggagggtggggcccctacaggtgggggcaggaggcggcggggggccggagcag

SEQ ID NO: 45 - DNA, 2204 bp, Homo Sapiens
agggacaaactcacttaaatttttttttaattcgctatcctcgggaccctaattagaattgggctgcccccttgcggtctctccgacgtcctatcttcaaccagctcacagtccttgggccctgctctcctctccattgtactctcaaaatgcaaggcgcaacgacaatagtaacgtcccagttacttctgagactctctaaactctggacttgcctccctcccctccttcaaagtctttcgaatcttctccagcggacaaatgaagggactgaagctggacaaaaccataacctaggagatcagggacctaccccattctgttccccgtgcttggaatcagataatttaggacgccgggcccgagaagcctggataaaaaagtcaggaaaaactgagtttcgttttgacctctagcgtcgtggcgggctggcatctgagctggtaacgtgcgtggtaggttatgtaagaaaagggatggaggagccgccccagcgggagccagaaaggacgcggtgttctcggttgcaatccccaccctcctcacccagcagggcaggaggcacccaacttggaggagaaaggggtgggggaggtgaaacagagaccggagagtcacgagggctgggccgccgagagcaggagaatataccgtgtcacacacctccattctctcacacacgttgcagacacaaatcactgacggtttccacgtgctgcgctcgtgagcggaggtgttcaaagagggggcagatgagttacttcccgagacggaaccgggggtcccacgtccgccgccttcagtagcacaaccaatctctgaacactcaaaccgcgcatctctggcgcatcaccatcctatttaaggccacgggctccgcccttttcctcccctcccttcttttccactctttttccatcctcctccttttctcatcaccgggtcctctccagcagccgcatgtaggggaggagcacggaatgcttcccttacagccaatcatcacctggctgcctctctactggctgagcccctttgtactgtagcaaatgggctatggacttcagtaactagagtcacgtgttaccggcgacacaaccaatgagggcgcgagatctgtgtaagcagggggaggcacgtgccgggccgcacgtgtctgggagggggggaaggggcggggcccactgagagaggcggaggtgggtagatagacccggagagacggcgaaggagctggaaaccgagccagggctgagccggctgacaacaggtaaggagattcggaggacaaagcgagctgttagggagtatttgggagtggatttgggggctgaatgcagatcttggtattgggagggtttgcatcacgtggcaggtgcgagcccagagagaccggcgcagggatcctgatcttgaaagattgggagagggcaggaggccagtctctatgggggcggttcccgtaggatcaccaggtgggttcgcgtgcccagattgactgcttgtgggtggcatggcctcaggtggagaggcttgctgcggactcaggctggcgaatagccctggcgaacaacgggcggaggggaaggtgtctttcaagtcggtatttactctgaactgagggaagaaaagaacggaggccgcgtcagaccgagagctgctctgcggcggccagagagggaatcccaagctcttaatgggcgggggtgggggtagaaatgtctttttctattgtgtttgagaccggtaatattggggagggggagaacaagtattatcccacgcagtacaccccaatctcccagttcatttcctaatccttaaactctggtttcaaactccctcgctttgctcttcagttgcaggttccgatctttgggtactccaggagctgttctatagcccctgcttctggacctatggattctccatctagcgtttcttcctattcctcctactctctctcttcgtcttttcccacctccccagtgaacagtgactttggcttcccctctgatagtgagagggaggacaagggggcccatgggcccaggccagacactgttgggcagaggggaggttcacggcccagcccgggtcctatccgctgcaggcatcgatcgaaggtttccggtaaccagcatacaccatctcatccgaaacagcggggttcggcttctcctatggcaggatctggggcgaaa

SEQ ID NO: 46 - DNA, 13135 bp, Homo Sapiens
ttcgtgcctgtttccgattttatcctccaaaccagacgcccagcctggtgcaaatgcaggagtggagtttccagggggatgtggactccttccctccacccccacctcggtccctgtctccttccctccgcccccacctcggtccctgtctccttccctccgcccccacctcggtccctgtctccttccctccgcccccacctcggtccctgtctccttccctccgcccccacctcggtccctgtctccttccctccgcccccacctcggtccctgtctccttccctccgcccccacctcggtccctgtctccttccctccgcccccacctcggtccctgtctccttccctccgcccccacctcggtccctgtctccttccctccgcccccacctcggtccctgtctccttccctccgcccccacctcggtccctgtctccttccctctgctcccatctcggtccctgtctccttccccacaggaggagtctgggggctcccgcgtcacaggggcgtggcccagggcatcaggtggggcggtgggtactgggctcagagtggccttgggctgtccagtccctccctttctccccaggaccagtgaccctcccagccccaggacacttcttgggccagggcccagggcagagccaatgctcccccagatactccctggctgcaaacctcaggctgggggtttttggggacagggatgcaggtgtctaaggacacgaccctccaggcagtggacgtttctgcctgggtggagggcacggttacgagagcagggcccgcgctctggcatcctggtgcccgggccctctgccctcaaggcctgtcctgccccagctcagccctctctggccaggcccatcactgtcagcaaacacccccacactgctgcccccccagatggccatggcagccctcccggggcccgtgtctgcagcccccacgcagcccggccggccgatggaaacgcacacccacactctgtcccacctcactccgagctgggggttcggggaccacaggtcccacctgcacaggttgcatctggggaatgggcctgtggcagaaaatgtgcggcgcggggcggggggtcccaaccaggcagccccaacctggactctcctccacccccgtcccacctccttgcccccagcacacggtggcggagtgcgtggggccagcctggcgggggctttgctccccgacctgcacttagagaacagagcatcctacgggagagagcagctcggaacgcagcttgagtaatgccgactttatatcagcacacccagtgcccccacgttcccgctggcccaggtcccggagaccatgatggcacccacagtggacttcgcaaaggagcgtggggaccccgaaggccaggccacccctcagaggggggtcccatgctaaagcagacggtgccggtgccgcagggcgtctgagacccacggtggagcccgggcctggcgtgcgggaggcggccacgacggcgcctttctcccaggaactccgggagggaccccaggactcagcgccagggcagccttggcaggtgcagtgaggcagtgacttgtgggggttagatgtgggcctgccccacgtgggcagggatcagccaggcatgggggtccagcggatccgagcggggccacagagctctggaggacttttctgcacaatgaatttctgcttaaaaacagagatcaagaggaagctctatcctgcagctccggaaatgggtggctgcgtgcttggggtctccgccacgcgggaggacagcccagaggcaccctggtctcaggcagctggttcctaggctgtgtcctccccactggccgggcaccggctggaacggcacgaggaccagcctcactgttctcagaggggtctcgggccactgggtgtggtggtgctggaggagtcctgcccgctgtgggctctggagggcacggcagcagagcccctggcttttctaggcagagcggcacctgccccatagatcgtgccagctttggctgcaggcgctggggcctcaccgtgtttcctgggggggcccggaccccccaaggcctcgatctgaagctctgaggtctcatggatgcctgctcctggtccgataaacgagatggctgtggtggggaggagcctcaggcggcccgggaccctttggcgtccgtcgctgggaggcggagggactcagagccgaggctgtgcccaggactgtcccgggcgccgggcgatgccaacactttgtgctggttcccgccaaggggtcggcctccgggtccctgccgccaagtgcgtggcgtggtctcggcctccaggtcagacattgctgatacgggcctcccccgggaaggcagcgggatccgtggccctgtccaggggccgctcccgcctgacgtagcgcggcttccgtactgaaacgggtcagagacaggcgaggtcagagtgggacctggacagcagggacagtgcaggcctcagccctcaccggaggctctcgggagtgggcatatggcacaggcgcccggggctgtttactctgaccaggtgggaacccagatgccccctgcccctaaggcgccctcagagctccagctcgggaaagggacggcttcctcctgcccggctgtgtcctctcatttacaccctgggccccggggcctggacaagggccaggcgatccccgaagacagagatgtgggtcccagagtatcatgcacctcagggggcgacaagcaggccgtagtcccaagacctcgaatgtgaccttatttagaagaaggggctttgcagggggttacgtcagggtctcaggtgtgatcgcccagggttccccgggcaggccctgaaacaacggccagggcccacctgagagagaggcagagagagaagacgcagaggtgggggagacgccgtgggaccaggggacagagacgggcaacgcagccacagatgcctgagccggcaggggctgggaaggcagacagcgtcctccccggagcctcgggaagcgtgtggccttgtttgccccttggttttggacttctgaactctaggatagtcagattaaaggtctgctgttgaagctggcagccccggggcactcgggcaccgtggggtctgctgggcacttgcagacagggctgctttagggacggggcacgtccagccttgatggagaacggtctgtcccctaaaggcacggtcacctgcccccatgacagacttctgcacagggggacggaggccgggtgagccctgctcatggccttggagctgtgtggctgtgcgccggtcactcagcctgtgtctgtggccccgcacataaaatgggtcctaaccgggctgactcttgggtccgcctgacccagcaccactgaagcgatggctgctcaggagggcctggcggaggccggctgcgtctgtcctcgggtggagctggacttcaaggaggagcaggtattgggggtctgccctgtcgtggtgggtcctcctttcctgcagaccccacgtctcgggaacaggaaagagcatggaagtcacggggattaaaggggggcgggcagggggcgccggccaaatccagctgagatccagagcagggggcaccagccaaatccggccctggccctgccttgtgggtgggtctcctggggacccgggcaggggtggccgagatccagagccaggcaaacccgtttggggacaaacccacagagcaccctgggactggcccagagatgggaaaccccacagggggatgcgacagctgctgttacctgaggactgtggcggggggatcattgcagccttgaaaaggagagaaaggcagagtgaggactcgggatggcctggcacaggcacacgcggccagggacgctcagcccggatgatgtgggttacttacggcttcgccaggctgcagggccggagctgtgggggagaaagcggagagtcaccctggagcccaggagctgcctcaacctcagcccagtgcagcgtccgggacagcagagcgaggagctgcctcagcctcagcccagtgcggcgtcctcggagcagcagaggccccggggctgcagggtctcccccaacctctccctgcggtgcatcagcctggccctcggtcctgccacattcctccggggcactcacaggtgcgggggcctccctagcaccccaggtgagtccccgctccctggacccaccttcccgcctcagcagaggggacaagcccccctcatgagaagcgtctccccaggctccagggtcccaggggaagggctgccctcccaccctcccgggaggagcctcaggcacgaggtggctttgagccccacggccgtgggcttctgcctccatggtgcccccgcgatgggggtgccgtggcatcgtggccaacctggcttctcgtcccgtggccaccagggctgaccaagccctgagccctgctctgctccaagggtgcccataggcagagatgctgagcaggccgggtctctcggtgcctggctgtgcaggagaccctggcagcgggctcccgactggaggctgggccctgagaccccgagagaggttgagggggatggacaggggtctcacagcagccaggtggggctgcccagagacctgggaggaggccccagctcggctatcacagtctggccaagtgctcaccttggggtccgaactgctggctggaccatctgcctggcagggaccctgcgggggccggccctggacaacgagggcaggcaccacggaccctgctcagaacccgcccccgcctgaaggcaccacagtcacaaggccgtctctccagtgggaaggggtcagtgcccaggcccggggtgaccgtgtgtacggcgtggcgtaggctggggtgtgggccctgcaccagcctggccagccctgaccccaggagaggggaggggggaccatggctgctggaggagcccaggcaagtccaactgccgagagccacccagccccgctccactcgcccctcgtgatgccctgagggccccggggagacgcctctgccggaagagggctccagcagaggttctgggccccgaggaaggccccttggtgcttcgacccttcaaatccacacacggctgtttccgggaagtgacgggccttctcacaccgggacccaaaagccacaggacaggccctgctccctcccggcctctgccagcctgctctggcctgggacactccagtctcaggcccatctccacggctggatgccgcctgccctgtgccctcccgtggggcaggtgctggtccgggagatacctttgtttcttctgtagcaggccctggggagtttactggagcgcttgaggtagaagaacccagctacggagaggatgaggccggagctaatgaagaacgtgcccaggaagagggaggcggccacgcgcggagcccctgcaaacagacaccgctgagcagacgggcaggacggtggccctggctcctcgcctggcccccggtgccccctgcacatggcagatgcgctgctctctgaacatgcctgagcctcacgggaccggctgtgggtgccgagggctctgcacatgggcctgggtcatccctgcaggctcagccatgcctgggcatctggccgcggggtctgggaaagttaccacctgccccggcctcagcttctctcaggagctcggatgttgggagcgttacaggggctgaccctggccgggctctgcggaaacacctctccgattccagttgcccctgaaagccagggggttctcagccttgttccttcctccgggctcagcacaggccctggggcccccacacagggcagagcctcaagctggcagcaggtgctcctgcaccccactcacctccacctgcctgggccaggacaggccagggctgctggcctggggctcgggacagttggcaatggctgctgggtgtgctctgagatgctggggaggagactccccaaccctgagacacaggcgtgtttgccaggcttgggggcctcgctccttcctgccccagcacagagccacaggaggccaggagcccatccaggccaaccccaccctaaaacactgccactcaggtcagcaatggacccaggccagctcagggccgtgagtgtgaacctgagagcgtgcagtgtggccgtgagcgtgaacctgagagtgtgtggtgtcagcgtgagccgtgagtgtgagccttaagtgtgaacctaagagcgtgcggtgtggccgtgagccatgagtgtgaacctgagagcgtgtggctgtgagctgtgtgaccctgagagagtgcggtgtggccatcagggcctcccctaactacggccctttagagatgtggcagagccccccatgacgccccacatcccccacccacaccagctgaccccaagctgcaggggctgccacgctcccctctggctgttttgcagaaccctgagcctgctgtggctgcgtcaagggtgagggtctgcactggctccgacggcccccagcccccaggacaccggcagaggtggctgtggcctgctgagacttaccaggatgtggccgcccgggggtccctgagcttctgttcatggggaatggcgcacccgggccagcaactgtgggatagcagaactgtgggaagcctgtgtgcacggagcccacggggacacccacgtgcaccctgaagggatctcaggacggaaatatgaaagcgaggggctgagggggcggagcagccctcaccacagagctgtcccgaatggcccagcagactcgggaagagggggctcccggggctgttccccagtggacagtggctctggggcaaggtggggacacagacagcaactcccacagtgtctcccacagctggagctgtgagaagggagccggggggagccgggcagacctacagcttctacactcggagccgttgtaggctgggagggttccgttcccacagcggacgcagctggcgctcccgtccgcgttccagcgcctgtaacagcctgcgtggggcagaggacgggcatgtcagccaaagcaaaatccacaccagctgggtctcctgggaatgattctctatttgagttggtgagataactttcattccagatactaacatgctctggagggtaggtgggcggcagacaaggacacccccagggagcatggcggggccgtgagcaccccacgctgagtactccacactgcgcaccctgaccctgagtactccgaccccaagtactccacgctgcactctccacgccgagcaccccggccccgagtactccacgctgcactctccacgccgagcaccccagccccgagtactccacgctgcactccacgccgagcaccccggccctgagcaccccgaccctgagtactccacactgcgtacttcagagagtggtaggcggcagcatccagaatgaacaggcctgttggagggactcgtgctctgcaggactgcaggctgggcccggcttccaccacccagccttcaccccacagactccccaagaacccccactgcaacgcctgccccaggcctcccccaagaccccccccacgcctctcctaggatcccccaacggcctcccccaggaccccccccccatggcctcccacaggacccccgcatgcctcccccagggtcccccacgcctccccgggacctccccacgcctccctgggaccctcccacgcctccccaggacccccccacggcctcccccaggaccccccacgcctcccccaagacccccatctgcagtgcctggagcggctgcctcgcaccccgtgttccctcatgccgcccaagcaggataggcccacccgccagcagcacagcctcctgccccaagctgatcccgacccttggtccatctgtcacctccacaccctggcaccctcccccgggtctctctcgggggatcctgcagaaccaagcctcatccccccgccaggccgacgctgcgcctgaagcctcatttccgcccaccggccagggcgcctttaaggacaggaattgacttttactccttgactttctaaatatctccaacactcagcccagagctgagtagacacactcttgatgccgactgcggtgcggctgctggtgcgggccacgggtggaccacacgcctcgacccttcctcacagactgatctgaatacaaacgggccgcggcgacacggggaccccgcggtggagagtgggcctgagaccccggcacggttgtgacaggggtcactctgcagacacacctcttggaagaatggaagtccacccgctcagtcctaccagggtggagctgcgctctcccagcactgggggcagcctctgtctcccggcatctcctggcacagggctcgggcgacttcagcgaggctctgtctgagagtctctgccccggaggccgaagaacggagtccacggcagggagccaaacaccagcgcagcactgtccccagaagtgcccgctgcctccccgagcggagacgtgacctggcttggggccgcacgcagggggaagcgtatccaacaccgcaggcccggcccctccccacgcgcgccagacggtccccaccctgcgcctgtgcatggggccacctcggcccttggacttcacgacccgctggcctggcccctccatgggcaccgtgactgctgcacagctgcctgcacccacagagtgcctggggtacacaatccctcacaggagacgccacggccccagcactcttgctgccatggggtgccaggggagtggttctcacccagccaccagggcttcagcatcagacgatgaggaccccaaggtgctcagcttcctcccagcccctctgttctccctcagagcggtgccctcctcctcctaccctgcgtgtgcctcagatgtcatcactgccttcctgtgggctccccaacccccacgcccagcctcggacccccgcgcccagcctcactggctgccacagccgccgtcttgaccacgccctcctcacgaggcccctgagtccccaggagcagcccttctgggttcttccatcatgggagggctggacccccaggatgggagtgccaaggcccttggaggtacagctggggcatctcagccccaagttcaccaagggccgccaaggagtggcccttgcaccttctcactctgtcctcccctcccctggctgctcccactggctgccctcaccagcctcaacctcctgacacccagctgcccccagacagtcccttccgcagcctcccagaacctctgatgaacagggcctgcccgtggcacgctgacacaggccggcatcctcgtggcgtcctgttgattggcattccactccacgcaccaggggccagcagcacctctgcccgagcacggacaggcaaaaatgtcttgggctttgccagaggcccctggagccaggacagccccgtgagaatggctgagctcatgggccactcccccagacccttctccaggcacctttctgatctcagctcctgcctctgctcccagccctctgctgggccagtcttctcatgaggctgccgctcaaggccgcccgccagaaaggaggctcagatgtccttccccaagctccacagccctcactgccccatccactccccaggtcccgcagcacagatgagcactgtccttgtcaccgaggggagggccctgggcacacacacaccagtggctcaggggccggtctggaatctgcttgggacaaagcggcttacctggaccacacagacttgcgcctgggcagctggcgttgacgcccaccacatccacacagcactcgggcagctgggcctggaggggacacggcagtgaaactccaggacgcgcctgccaggcaggctcacgcccagagcagcagcggctgaggggtgccgtgggagcacatctcaatgtccgcagctccggcctcttctggagtcagcatcgggtggccctctgtcccctgtgggcctgggagcaaggaggggcctcacagccacagtgcacatccctgtgggaccctgggtgggcggtctccaaggaaaagctgggcctggaagagtaaaccacccccaggaggcggcacccgcaggccatggcagcgccaccgacattctctgcaagtctccggaggctctccatcaggggtttccgcttgaccccacagaggaagtgcccgggcctggctggcatttcaggggacgaattcacgcccaggtgcccaggtactgcacaggtgcgctgggtgctggcacttacggtgtgtgtgagggcccattccctgaccacaggcagactggacaggcctggggggctcagggtaccctcagcttgtgtgttgatcacagctgtgctgtttctcgtgacctgaatgcagtgaacggtgagggcgtccaggggtgactgcggagtgcgggatagaatccacaccgccagggaggggcccaggtccggtccctcaaacgccccagccaggacagtgaggggtccccaccctccacccgctccgcctgggagtctggagccgccgcagctacactccccgatagcgatgcgcggcacgctgtgctgtcaccgctggcagaggtgctcccattgcgggccaggatgcctcaccgtgggggccccgcctgacccagccattcctgagcaggcgctcacccagcaggcagcggagggctcccctctgcgaggcacaggcccctctgaccccagcagtggacctggtcagcacctctggggctgggacatcagtgtcctaaaggtggaagggttagaccctctaggggaagggcccaccgccctccacagaggctctggcttaggccgcgtggacacgtgaggggggcacctaccgtgttctccatggacttgctggcgactcccacgagaaggccagccaggagggcgaggtgccgcagcgccatgccaggagcagatgcgcagagcctgccacagggaggagcatgcggagccaaagagatggagtggggctgaggcagggtgggtggggccaaatgaaagtggggtcaagagatgttgggggggtgcgggccaaggcaaggagggcagagccaaatggagatgggtggggctgtggtggagggtggggccaaatggaagtgggcggggctgtggtggagggtggggccaaatggaagtgggcggggctgtggcagggagggtggggccaaatggagatggggtggggcggggccgcggcagatgactgagttaaatggagatggggcagggccgtggcaggggtgcagggccacgacagggaaggtggagccaaatggaggtggggtgaaagagtgaaggcttggggcctttggaggcacgggtggggcgaggtgtaggcagggccttacctgcccctccaggatggggactaccgacatcagccctttgcccgcctgggtgttcaggggttagctctgggagctcatgggctcagctgagccctgcagaccccggcccagtcctgcagatgaagacagcaggtgaggccgtggtcacgcgagggcaacccaggtgggccgtggcctacggtgcggggtctgggtccggtccgggccctctgtccacacccttgccggcccctggctgtcgagcagggcgtcctggaggggctgtctccacgagtgtttcccccgagctggcctcctggcctcctgcgggtgagagtgcctgggatacaggccctcgctgggatacgggccctcggcccggcctttgctcagggaccaggtacggagctcagtggcccaggctgcacttggtggacaccggtcctcccgcacaaaccccctctctcccccctgcacttccagccacaggacctgttaccatggccctgccttcctaagggaggaaacgcctgccaggcgcacaaatcctcaagtggtgtcactgcactggctcaggggcctccctggcaagttaccccgaggggggctgaggcccagccaggcctgtggggctcctcttgatgggcctaggccggggtcctgggacaagggctgtgagcagcagggagacggaggccctggaggacacagctccagtctctgcacagggacggtccactctccgcacagggacggtccactctgtcacccattccatgctggattcaggtcatggcctcacaaactgaccaggctgcccaggtgtgagcctgccggaggactctggaaggtgggggtggtcggaatgcttgagctcaggagttggagacccacctgggcaacacagcccgtctttacaaaaagtttaaaattagtcgagcctggtggtgggagcctgaggtcccagctactcaggaggctgaggtgggatgatcacctgagcccagaaggtggaggctgcagtgaacggagactgcactccagcctgtgcaaggggaactccgtctcaaaaaaaaaaagcatgctctcctctgattcagctcctcctctctgatgtgaaatcctttcagatggaacgtgttgaagtcacagacatgctgctcgccccacccacagagtgcaatcaagtcttagtttgtccttttgtccctttaacatttgcccagcagagaccgtcttcccctgctcagtggaaaactccagacatcacagacccttctgctccctctctggttaaagggcatcctgagggccacattaagtcacaaaacatcattttgattcaggaaccagaagtccaagatttcaatcaacactttcatctgctatttagtcaacttcatggagatctactttacatacaataaaccacatccgtgtaaagtacacaagcgggtgagtgtgaccacccccttgaagctgccaccacagccaggacggtgcccggtcccacacagctgccagcactcgctgcggcccccacaagcccgggctcccggcagccaggagctgaccagactgcagctgtatcttctagggtcttacacaaaggggttgcacacactgacctttagatccttccatgttgttttatccgcactttcttcctttccacagtcggaggattttccactgtgttggccaaacgtcaccgcct

SEQ ID NO: 47 - DNA, 4852 bp, Homo Sapiens
ctcggctgactgcaagctctgcctcccgggttcaccccattctcctgcctcagcctcccgagtagctgggactacaggcccctgccaccaggctcggctaaatttttttttttttttgagacggactctcactctgtcgccaggctggagtgcagtggcgcgatctcggctcactgcaagctctgcctcctgggttcacgccattctcctgcctcagcctcccgagtagctgggactacaagcgcccgccaccatgcttggctaattttttgtatttttagtagagacggggtttcgccatgttagccaggatggtctcgatctcctgaccttgtgatccgcccacctcggcctcccagagtgctggggtaacaggcacgagccacgacgtccagccttggacatacattttgaaaggcaatggggtgacaaagagaggaagactgggctgggcgcggtggcttacgcctgtaatcccagctttgggtggctgaggtgagcggatcatgaggtcaggagtttgagaccagcctgaccaacatggtgaaaccccgtctctactaaaaatacaaaaattagctgggcatggtggtgcatgcctgtaatcccagctactctggaggctgaggcaggagaatcgcttgaacccgggaggtggagaggttgcagtgggctgagattgtgccactgcactccagcctgggcaacagagcaagactccgtctcaaaaaaaaaaaaaaaaaagagtaagactgtagaagtggtatttgggtgtttgggtgggaggaattcgggagcttgatttttagatgtaagtttgaaatacctaggccgggcgcggtggttcacacctgtaatcccagcactctgggaggccgaggcgggcagatcacgaggtcaggagatgagaccatcctgactaacacagtgaaaccacgtctctactaaaaaatacaaaaaattagccaggcgtagtggcaggcgcctgtagtcccagctactggggaggctgaggcagaatggcgtgaacccgggaggagctcgcagtgagccgagatcgtgccactgcactccagcactccagcctgggcaacagagcaagactccacctcaaaaaaaagaaatacctattagacatccaactgggtatgtatactagacagttggatatatgattctggagttaggggatgagtccagaaagaaatataaattacggagctgtcagcgtagagatggtgcagaaagtcttgacgctgaaggctgggcacagtggctcactcctataatcccagcactttgggacgcccaggtgggaggatcgcttgagcgagttcaataccagcctgggcaacaaaggctggtattacaaaggcccgtctctacaaaaaaataaaaagttagccaggtgtggcagcccaagcctgttgtcccagctacttaggagactgaggtgggaggatcacttgagccctggaggttgaggctgcagtgaaccataattgtgccactgtactctagccttggggacacagcaagaccccagtgccacaaacacacaagccttgacatggaaagagatcaccacattctatgtgccctctcatccctgctcactccattacttggtgtccctaagctcaatacttcccttgctgatctgaggccatacagtctggtgaaagagggccggactcttggcttcttaacacattcacatacgtttgtttaaaatttccagtgtttcatgctttcagcccacaaagcacagacacagttttaatgagaggttttcacatcaggccagagaatgtcagtcttctccatctccatagagattttaaaaagcacacctcagacaaaaaagaaaaacaagcaattaagactatttcagggctgggcacggtggctcacacctgtaatcccaccactttgggaggccgaggcgggcggatcacctgaagtcgggagttccagaccagcctgaccaaggagaaatcctgtctctactaaaaatacaaaattagctgggcgtggtggcgcgtgactgtaatcccagctactcgggaggctgaggcaggagaatcgcttgaaccccggaggcggaggttgcagtgagctgaatttcaccattgcactccagcctgggcgacagagtgagaatccgtctcaaaaaaaaaaaacgtttttttcacaaggaattctgaggacttgttggctcaattgcttggacataaagacacacatacatgaagctggagagataggaagaagcgctcaacacagaacaccctaagtatccctactccctttcaaggactaaatcccttcagagatttcctttgcttcagtccttcaggagcctcccgaagatgctaggagtcgtttaagaaggctggaagatggccgttgggaaggaactgttggtagctggcaatacttcatcccaaggaggcggtggcaatagctccctgggcagcagacatcatggattttcctccctctgggaaccagaggtccctccgtttctggtttgaatcccttagagacaaagaacttcattctctcccatacccgcgtgggactgctggggaggagagggggtggaggggttagacttctacccccatgaaacacccgcgggctcaaagaggagcctggatcctgactggtccaggaggcgtgcggggccgcggggcccctccggcttgggccaggcgcgttgccaagatgcccggggaaggggccgcccggcgcaggccggggacgtggagcgctcggggcgctcccacgtaggccacacattggccgcctgtatcctccttctttcctctcaactccattctctcgcgcttttttcccggggagcctccgctttccccttcttcccgcggccgccctcgcccttcttccccctccagaccctcccccggctcgcccctccctcggcagcccaccttcaccccgctcctccgcgcgctcctcggtcctcgcccctcagccccggcctcccctcgccggcccccggcccccgcggtcccctccctgcccccctcgaggcggcggcggcccctttcacaatagcgcggcccgcctccctcctctcggctcccggtgcactcccgcccgctcccctccccgcgcatgcgtcctccggttggcggcggctgcggcggtggcggctacgagcggctccgtttttttaaagggaaacgctgaggcgccgggggtgactgtgggggagggggaccccgagccgcggagacccccgggagaggcgacagaccccctctcccggagtaggagggctttgggcggacccagccctccaccccctcctgaggaggaggggggggaaatggaggctcggggcggttgaggcgagctccggggcggggggccggggcggggaagggggggtgcggggtggggagacgaggcgggcccggccgggccagggggggccgaagcgagctccggggatgagctcgggggcggctgggtgcgagctcctgcctctgaggcgaaggcggcggcggcggcagcagaggcggcggcgaggcccccatgggccggcggcgggcctcagccgcggcctccacgtctccgcacgccggcgggatggcgcccgggccccggaggagccgcgctagcggaggcctgctgccgcgctgctgaggcgagcccgccaaactcccctcccccccctcagtcctcgaccccccgcacctcgccccttccccaccccctcctccgcctcggtgcccggcgctgctccggaccactatgaccatgagatccgcggtgttcaaggcggccgcggcccctgccggcggcaatcctgagcagcgactggactacgagcgggctgcggcgctgggcgggcccgaggacgagcctggggcggccgaagcccacttcctcccccggcaccgtaagctcaaggagccggggcccccgctggcctcctcccagggcgggagccccgcgccttccccggccggctgcggcggcaagggccggggcttgttactcccggccggggcggcccccgggcagcaggaagagagctggggcggttcggtgcccttgccctgtccgcccccggccaccaagcaagccggcattgggggggagcctgccgcagccggagccggctgcagcccccggcccaagtatcaggcggtgctgcccattcagacgggctctctcgtggcggcggccaaagagcctacgccctgggctggggacaagggtggggcggcctcccccgctgccaccgcctcggacccggcgggacccccaccactacctctgcccgggccgccacccctcgcgcccaccgccaccgccgggaccctggcggccagcgagggcagatggaagagtatgaggaagagccctctcgggggtggtggcggctcgggagcctccagtcaggccgcctgcctcaaacagatccttctgctgcaattggacctcatcgaacagcagcagcagcagctgcaggccaaggaaaaggagatcgaggagctgaagtcagagagagacacggtacgggaggggttaatctgcattcgggccgaggagcgagttgtgcgcatgctcgggggaagggggctgtaggaggttaaggcacccccgggttaggggtaaaggaggttggccaccggcaaaggagtatcttaggcgctgggtctctgggagccaggctcacagacacgttgggttggagggaagggttaaagggcaacctctcagggggagggggaggggtttcaggtgccaaagggttaatttaaaatgacagccccagacgtgtgggaaagacgtttagtggaaaaagacgtga

SEQ ID NO: 48 - DNA, 2519 bp, Homo Sapiens
tatgcaacgctggattctaaatcggtcttaatttctaaaaagcctacaggcacggatataaattctcagctctcgtggctgtggccgccctatgcactcttcccagtggtggacacaaacgttaatgtacttgttattatttaaggacacaaaaatatagaaggtggcatttttcgctttccccttcgaagactctccccagagctgccagatgaacgcccacgccaccttctcccaccaaaggtggatccagctaacaggagactggatcgcgaccatagcgcgtttgtgcccagttctggggaaagcctcatgttagcgagtggccctcggctcgtctcgcagatcggccaagtacgcggaggccgcgcggtttcaccattaatactcctgaaggacaatagctcatcaagccccaccgaaagccccggacccgtcgcggagcctgggctggcgggggatgaggctgagcaactcctcctagaggtggttatgtggagaaggagcaatcccttctccctcctcctcctccccccgctactatccgcggcccagagaactgccgcttgccgccattgacacgcacagatagaacccaaagaaaggcaaagagtcctgcccggcaccggcgccgcgtgggccaaacctgcgcccgtggaggggcgcgcagagggcaccgggcgccgggagcaggcggcgcagcaccaggtgagcccgccatggcgatggcattattgtttagggtgctccggggtctggaaacaaaacgcgccgccggggcagtgcaggggccggagagaaccacctctgcctctcccccgagcccctgcgggcgcaccctcgatagccgacccaccctctgcaaaaacaaattcttaaatccagctgcccaacttgcttccttgggcgataaagggggggctgctaaagaagtggtcaaattcctgcggccagcgaggggccgggggcgtcgagggtactgagaggggaaggaggagggatgcgaggttcagcagcgggccccaggcgaggctggacccggaggaagcggaggtctcctgggaatgcggagtttcgggcgcaggagcgggaggacggaggcgcccggccgccgatgggcacggggcgatgggtggggggctgcgcagggcccgagggagcccggggagggccgctcgggggcctctgaaggtgcccgggcagggcgccggcggctccaggctgacaatggagggggcgcggagcagccgggcggaggttagggacccgagtccgggggcgggccgcgccggggaaggtcaggtcggggacgccgggtggcggggcgagggctgggggttgctgcgcggacacccgggcgccgcgggcgggcgtgcgccccggggccggcgcggaagagggcgcgaggccgggcactccccttcggttccctttccggggcgcccggtgccgacgcgcgctgcgctttcaccgggaaatggcggcccggccgtggctcgcctgggcagtctggctcccgctttgcgcgggaaaaaataataataataaaaatatcgaaaaagggaataaaagtaaactggctgcggcgcaggaaagggctctgccgggcgccggacgccgtgcgtatcgctcgcggggcgcggcggttggggaccagccctgcctcccccggctcccagcctccagccccggcgcacctcagccccagcccggccagccccccggatcgcccgtgggtgtcctcccccgcctttccttgggggggcgccctcagttcttgccctctttgttccttacaacaatggccaaaggggcattggttccccaagggccaaacgagcttcctccaggagtttcccgtcgcgtgcagtggaccaccgtgggcctgactgaggcctggtccttgccagggttttttggcaacggccctggatgagtgaagggatgaaaggcgcgagaagaaatgggctgagaaaccaaagtgcggggccctgagtgtttgaggggacgcgatgggaaccgtggctccgctgccctgattttaagggcagttaccctgtcacagccacgctggaactgaggtgtccttccagcttctgtccacctcagaggaattcaaaacaagggcccagttctaagccccacagaccccaggatcccctaggggccattagtccaccgcggcaaatggtttcctcactttgctcatttgtgtttgttttgaaatccaattgtcacctcactgggctgcacagttgctactgaaacggttcaataggtgagagaaaaagaaaacattattaagagcgagaacgtgtcttcgtgtgtgttgttttgaaccacaaactaagctacacataattctcaatccgttttaacacactttttattttcaaactaaatgttaagagctccaagatttggaaacatactggtgatttttagaattgttttagcctaaaattacatataaataaatagaggcactgcccggcggaaaagtttatcttgagtcgcat

SEQ ID NO: 49 - DNA, 9783 bp, Homo Sapiens
ggctacatcagacctctctccaatcgctctcttgaattcccagatgatccagagcggccggttgactttgccggcccaccctacacctagggaaggaatccgttctggagataccaagagatactgcattctcaactttaaaaccagagtgagggcgggactcggcctcgggatcccagtcccaaaccccaggatactctttcttggttcgagtatgaagaaggaggattctcaatctcattttctctctctctctctctctctacacacacacacacacacacacacacacacacaccacacacacacacacacacacacacacacacacacacacacacacacacacacacacacacacacacacacacagagttggatccttccccatctcccttatcctcaacacaagcgggctccaggaaccgtccagggcggcgtccagaccctgccgagcagtggcaggccccaatggtcacatcccgcccctattcccgccatacctccctcctggcctggaggaattcccaccccatcccactctaggtcccctgcggccgcccaccctgggggctggggcgtctgagttgaagttccctcgcccctcgcccggcggggcaggttccgggaagctgggaggagaagggaaggggctccgactcggacctcaggaggccagagcccctgccggcaggtccgggccccctcgctgcagcccggggaggggccgacgcggtccgaccaccgcccagcccggatgccgactccgcttggagggaacggggtccacgcccaggccgaagcccctcctcgcacgggccccgatctccgggccagcgaggaagggaaagtgctctcctggggacgagttcccaagacgccccaccgcccgcagccccggcccagggtaccttccgctccgccgcctccagctgcgcggccggtgccggaggctcagactgaccccagggccccgccccgccctcctccagcgccgcggcggggagggcgggcccggcagggggagggtcggccgggggcggcccttggctcggcccgccccggccccgcgcagggccgcagcgcggcggccccctccgcagaaaaaaaactgggggccaggggcgtccacccctccaggtcggggagagccacggggagattcctggactgcggaggagccgggcgagcggggggagcacgacccgggtggactcagactctgcccagccttcaatcccctaggggaggaccggcgtcgggaaagttaagaggtgctcggggtggggtcaggaagggccgctgctgccctcctgtggccaagcggccacccgctcctgctgcacctgggacctcgcgggaagcgggactgggaaagggtatccgccgggaggtcccagggcccggcgcgggtgtgttggttggggggagatgtccaccctcttgttcctaggatcgtacagcccaacgtcatcccccaaacttgaagacctctcagagccgttcagacccagaccaccgttcctcctcacaattcgctttcttccctgggcctggaatttccaggagtccaattcctacctactcctcaaagggtgcgcctagaaatgcttctggatcccagctgtgaattctgttcccactcctaggtctgacttggcgcataggatatttacctacacgcgtatctcctttccctgtaagggagctgaggaggtgggagtagaatgaggacgtccaccaacatttcattggcttgtgcttgggacactacacagcttaaccctttcaatattcatcacagatctctggggaaaatatacccatccccttttgcccatagagaagctgaggttcagagaaatcaagtggcttacacaactgtttttgacttgtgacagcaagaattcacacagccgggcctgtctggctccaaactggtggtctggccctgctacctcacgggctcctccagcctgtcccttcccccgttgtctagcagagtgagtggcacataataggttgtcaacaaatatttgatgaatgaatgaatgttaggagtcatacagactttaaatatctgaagtgcaatccagacatttgacaaatgtgaaaacaggtccgcagcagtttggccccaggcctcttaactgactcaatgaacatttctcgagggtgaactgagagctatgttcggaagatccatttctgccttcaaacaacttagagtctaaatgaggaatgcaatttcaagatagctaacatttattgaatccatattacatggacctgggtccacatacattaactacaagaatcccatgaggtagctatctccattttactgagaagcaaattgaggttcagagaggttacagagctagtgctgggtctgacactagaacccaaacagctgaactctagagcccctgttcttaattcctactccctactgactcctaatgtagacagttacaataccggaggtcattgctgtagtgtgggcatgtgtgggctgtgcgatacccagtcctgaacaacaggtgaagttctcaagataaggtgatgtgtagatttttttaattttaatttttttttgagacaaggtctctgttgcctaagtgtgcagtggcaagatctcagctcactgcagcctcaactttccaggctccaatgattttcccacttcagcttccccagcagctgagactacaggcgtgtaccatcacacctaatttttgtattttttgtacagatgaggtcttgctatattgcccaggctggtgaggggccttttctaattattttgctcatctttatttttgcttcccttaacttactttgggtttaatttgctgttctttttctagcctcttaaggtggaaacagatcactgatttgagatctttattcttttctactataagcaatactcttaatttccttggatgcttaactgcttcccacaggcactcaccactacattcagctaattttttatttttttgtagagatggggtctcactattgcccagggtggtcttaaactcctgggcttagcagtcctctcacctctgcctcccaaagtgttgggattacaggcgtgaaccaccgtgtccagcagtagattttgaataagttggagctactaaaagcccacagttatgcaaaccccaggaagttggtggtggtggtaaaaaatgaagctggagaaggaagcagtggctggatcatgaaggtccttatatgccatgcacaggagttgagtgttgattttgttctaggcgcaataaggagccactaaatttaggaggccaatatagtaaaaggtggtggtgactgaaggcggggagagatggagataagtagagaaatacttttaaaggtctatagtcaacaatacttagtgatcaattaccttgatgagaaagaaatgaaagccaagggtgaccaactccaagatttctaactggagcagcagagctggtgcccattgaggggatataccaggagaaggaacatgctatggagggcagtcgtgaatttagtttgaggtatttgaattgaagtgccagcaggctatccaggagacattcgggagatgactggtatgtgtgggtctaaagctcaggaagggtctgggcagatgggtgaggccacagaagtggatgatgacactcacagcaaatgcgtggagtggaaagagtgggggtggaataaagaacctgggggacaccacatttctagaactgttctggtgctctttccaccaccccacagagctttcttcttatctttcagtttctagtcaaagcaaatacagacacacacctttatccatctcgtttatttgccaatagctgtaattttggatatagcggacatcccttcttcagttaagttgccactaaagaagggtcagggagacaacttcagaatttgggctgtgagaggagtaagtatggagaggctagtgggagggatggtgttcagcccctcaggagtaactgcctggccctcccagggggatgacgaagacagagatgtcatccccggaacccagcttgttgttggggagacgccagccacggtctcggggggtaccccgggcccccaggaccagagcttgggccagagctgtatacctgccaggagcacacatgcacattcatgtaccaacatgtatgtgggaagacagatacacaggcccacatgtggggtcccaagcattgcttccctttgacccttctttcaccaatgccatccccttaccaccatgccatgcagcccctacctgctgtggtcattaggctcataggccgacagcaccctgtccacagtggcagctacctcacagtcagtagtgacatcccacaggccatctgttcccaggactagcacatcatctgggcagtgctcatattgtgtcaggtcatacactcgtacctggtgggagaaaagggcagagaggattgaggtgtggggtttgctggacagggagcttggagataaagggactgcagatgaaagctggcctgagactcccagagaaggcaaggtgtggtttaaggggctcacctcagggaagcaggagagaaagggcttgatgggcagggtggaactgcagaccttaaggctgtggtctcccaagcctcgggtcaccccaatggtggccatcacccgagcctgaaagaaatgaggagggagtgccactgtagtcctctgctagattctctgaaaccaaagatcccttccacccctaccctcaggtagaacctccacctccctagacaagttgtgataggtcctcctcccctctcccacctctaccatggagtttacctttttgccctccccacagaccagaggaaacctgagatcctccagctcgatctttttgtaggccctggggaggggggagtagaggaggcatcacccaggcatcaaagcccctctcccctaggagctgcataccctcacacaaaccccttagaagggccacatcctcccaactcccagcctccagcttccaccttgctgcgggcgagggactggttgtgttgccatgggaacgggccccagctctgagggaagtgttaccagccggtcatgttctggtcccggtacaacatcctctgccccagctccttgggcagaactctgcgggggaactcaaggtgggtgaattcactgcctagcagctctggtttcaggaagccctggagttggggatgatcagaacagagagccagggggcattatgctcacagcacacggtggcacacagatgacgttgactacagcagacccttaaacagagtttaccatgtgccacacgttattctaatattagcaaatattaactcatttactcctcacaacagcccttaaggcaggaactattgatgcacagagaggttaagggagggaactgctccggtcacacaattagcaaagcactcagaccaggatgcatcccgggcttccagctccacagccacatgcgtttaggcactaagccggactgcctttcaggggcctttgctgtttccttcccccacctcagtctctacttcctgcctcagctggggccacagtgggagcactggaccagcccagtgctgcagcctccctgctgcaacctcccaccggctcagccccgcactccatagtccacacagcggccttcccagtaaagtgctttctgtgcctgtggtgggggtgtgagagttctcagggccatggggtgcagggaggcacaagacccgacaaagaatgggggtagggaatttggttcctacttacaagcagctgaagacgctggcgctcagtctccggggtaaactcccgggacattggaatgatttcaccattccggacaatgatggccctgcccaaagaaagaaaaggaattgggacctggttctcttcagacccactcatgaaaaattccagaaagaccaggccctctccataatgacctttcagatctcttacccagacccccatatctgcccctgaccccacccaatggatatttcaggccactccttatgtctgtcacccctcttgactccctccaatcttgatttttaacccctgccaccttactctcctgtattcccccaactcagagagtgtggccctctgtcgccaccttggagccccctcccccatacctgctatcgcctgcattggccacgtacaccttgcctagcaggtagatcacaaccagtgcacagcagcccccctccacttggtggccacgccgctcccgggccatctgctcatcctgccacataaggaagggtcagaggtgggtagaaggagaggttccatcacacagtcaccctccccctaccccctccacccgtagaaatcaactggcccagccaggctacactggaagacaggagggaagactggggtgtaactgccccttctccctcccctctgaaccaagctctgctcaggctctcaaaggtgttgtgggttctcagggtaaccccctctggcttccacacagagttggccagagtggttgcctagcaggctcttggcccaggtcacccactcaccatgagctggaaggcattctcaacggcccccactaccaggctctcgtggctcacttccttctgtgaagaccagcaggactgagggccaagcaagtgagagggatcggaggaatctggggtccccggagtggttgggaggcagaggggtggtggcgaagggtcctgaagtatctctaccaggtcctttagctgctctcggatatggcgatgcaggagccgtgaggccatttcagcagctccgccccctgcatgcccatcaaataggccccagtagtagaagcagagtccctggtggaggaaaagttggaggtgagttttgtttgtgtgtgtgtgtgtgtgtgtgtgtgtgtgtgttatgcaaggtgaataacaagactctgggcatccatacaaacatctgagaggtcagtgtttgctactgaaggcaaattaggtttattcacataaggcttcgtatgtgtcaagagaaaggaaaggctcaaaaacccaaactcagaggataacagatccaaaactcagcactggcaattaaatcatccataaatatgtgagcctctacattttaggtgggaaagtaacattcatgcttacatggtagaatctaactgatgaataccaggtaaaggttctgtgccagaaggtagatagccagtgagttcatcaggtcttccgcatggctcagatttaaaaccagaggcctgagtccctggggagaggtgtcactgtgtctctgggaaaggggatgggtcttacctggcctcggctaggctccctaggtactcctgtaacactcctccgaccttccacatacaccacttcacagcaagcctggtcctcattgtgccgactcttgccagcattgatgaccctgccaggccagaatgaccacatcaggttggacaccagaccaggtcctggaataacccccaccttagacacacaccgtctcctgcgcccgctggccaagctgagaaaggtcacagccacctgggatccaggccagagggaggaggagaagggagggctggcaaggtgtaatgagtactgtttgggtggccagccctaccacttcacagaaaggccaccaggaccttctggccaaccgctatgtcccctgcctgcctcacttcccccatccctggcaaaaaaaaaagaaaaaagaaaaaggcattcctagtggtgcttctgggggaggggctagttggtagcagaagttttacttccctgctagctagaccctacatcccaccctcaaccactatcaactctcccagtgccttgtccccagcacctcatcctcatgggcacacccacccttatcctaaaaccatccagcgaaagtttctgctgccttaacaatgaggaagctctccagcccagatcgggaaagaggaactgaaatagagtagaagtgaaagcccacctggactgggcaggagccacatacccataaactcctcccacacaggaggctaagggaggtggtggtgggtccatgggccaccagccaccttcctcagcgaactgagcgcccccatctccctcggtgctctgcgttcccggcagatgcatttaaaatacacacagcccgggggccagccggccgctccgggcagggggtccgcttctttgccaggccagcacgagttggcaggctgaagggcatctaaatgggaccctcctctaccccgggcgtccccctccccgctcctggggaagctggcggcctcctggtgtcgcgggctatttctgggtgtggagggggaggggaactacggtaagagggacagggaactggggcgctggagccgggaagcgggtgagcgagtcttcccaaccgctatgtcccctattaaaaagaaccccgctccttcgtgaaaccccttttcccttagcctttaagctgccgggccgcgacggggaactggccaactcatccttcgccgggctctccgccctccgggctctggggcagaacagggtcctgaggcggcgtgggcgagggcagtcaatgagcgggaaggacgtgaagaaggtgacacaggctgccccccactggaaaatgggttgggagggggtgcggcccgaagaccagaggatagcaaaggtccacggaaaagggagctcctggcccggacgcggcgtggggaacgcgtcctagcgccggggatgcggagctggggagaggggtgggagccccatcctggtttgggtgccccagggggcgctcactcggcgtagcctgtgctccagggcaggcggcggcccgtgtccggggggctttgcacagcccggcccgcgtggtcatcggcgcgtcgcagccccccggggctcagctgcaaaaaggtcggtctggagaagctcgctcgagcctcaacagccttcgcgggcgtcgcgctcccgctcccaaccttcgcgggagggctcctgggcgcttctggagcggcggcgggcggcgccgaggcggcgttgggcaggtccggggatttggggcgcggaggcggagcgcccccggagctcaccaggtgcgccacggccgagcgcacccggtttagcatgctgcctccctgccccgccctcggccgcggccccgcccccgcccaggccccgcccccatggctccgcgtgggcggtgctcgcgccagccggcccttccctgctactggctcccggccagctgggcgggtcccgggcgaaacttgcccttgctctgggccaccccaggaaccggcccacgggtccccggcctctgccccgccccattccggcttggccccgcctccgtttcttaggggtaggttctgttgctgtgagaagggggcggagagaaggaaactttatttcagccgtgcgctagattagacacagctagaatgtctccattgtgacgggggctgagggacaagggggtgcggtctcctcgctctcggttcggtgtggccagccagcccagagagccatggagctaatgacctcagagcaaaacaggcgcttgggagccgctgggtatgaggcgccaggtgtgacaccacctctggatggggctgctggagcgagagcgggcaagctggtaccgggtggggttgcgggattaatgacgcaggctgcagccgaccaccccggaatcaggagccggggtagattcctgggctcctgatgcgctgttccccgtgaagaccacctctagatctgggagagcggttgc

SEQ ID NO: 50 - DNA, 13537 bp, Homo Sapiens
tgtacaaccaccgccaatccggtttccagcagaggcttgtgggctagggagtgtatcgatttgtattgttaaaggaatttcctgctcctctcagtgtcagctgaagagccctctgcagtcattctcctattttgagagaagagaaacaagaggagacgaactcctggttccttcctacggggtgtatagaccagtgacaatgttagtcctacaatttggatttatttgtttgttttctaatcaccgccacttctccaagtacaaagtctgtgtctataattagatatcttctacatgttacaccggcaagtccatctcatcattttacagagggatggtgacttcctttagcgccccatactgaccgcggtccctcacctgctgactgattgacttataaatctgccccccacccacttgtctgtccattgaaggcaaattcgccatcgggaacacagtagtttctcaataactatctaatgcatggccacccttcccaggatttagaatatcaaagggacgtgttctttcctcccaaatcacctgcctgcgcttcccccagccgggtgccccagccttcacctcggtccggccaccacctcatcccgcttcttcgcggcttccaggcctcgggctgggatctcagcccctgcctgtaggtgcggcccagagggtgcgacacgcgtcggagcggggcagcggaggaggggacagggacgcggcagccacacccgcatctctttcccctctcgggcatccccgagggcccttctgcctccagttccttgagcccccgaagccccccatgcggcaagagcgagtcgcaggaacaagtggggaatcttggccgcggccccctcccccgccttataaaaaagaaattgacttttgtttggagtttgtgaaaagtggggctcggggcccagtcaatggggcgccccgcggcgcgggctgagtggagctagcgcgaaccgctcagccgcggccccaattaatccgccctttgtgcggcccgcccggccgcccccgccgcagccgcaccagcggcccattgttcggcctcgccgggccgcgggatttacccttttcaaacagccggttttgtccagggcagttcgagcggaagtttctcactgacaatttgccccaaatagatagatttgtcagaagcgaccttcgggaaggaagcaaaaagccaccggcccgaaggttgggcccaaaacagggactctgcgtcccacccgcggccgcgccgcccccccgcgcccccggccctgcagtcccgaagccccgcgggggtccagaccactgcacctgctgagccagacactccgcggacctgacctccgttttacccatctgtaaaatggagcagctgggcgctggcaagccgtaagtccaagagctttggctccaccagcgtgtacgacgctcatttcctttctctctccccacaccctttccaaaaactgtaagccagaaaacctggccaggcctccgcgacggcgagaaacggtcttgaaggtcggtcggtcgccgtaatgcggtccggatcgtgcacgtgctgtttcgccactgccctccggctcctccttaacaaagatgtcaaccgtgctaaatcacaggtggtgcctttgtaagaccagctattgtcccctcataagtcaagatataaaacgctttgtactgaatggcccatgatctggagcgctcaacttgggagttgagctgttagattttcttttccccacccaccagagccactcttctcccaaatgacctcacttaataagcaaaatttaaatggggtggggggggactcaacatgctgtggatgaaaagaatagttactgatttcttcacacttaatggcatgtaggagtcttttaaaatacagtctcataccaaacagatctgtgaattttaagcagaactgaattgtattaatcagttgatgggtttgttcatcttctatcactagatgagaaatacaaaggttgggaatccacagcgtctaattctactgtacttaagcaatctctccctttagtccagaaaatttcctactagttgcacatgagagaaaaattgaagcaaaaaaaaaaaaatctgttttttgtttatccatcaggtgaatacacacttcagcatcatacagaggaaaccctaggtggtctttagcaagatttcagtggttaagagctacaatttagaaaagatgacaatacatacacagtgtcaatagtatttaaacaaacatcccagacaacagaataatggttattaactatgatgctttgggcttctgactaatttcccatgtctgtctgcagccaaacagctgcaggatttttccccctttaaaaactgtttgtgcatcattttaaaaattgcatttaacagccatattctccagagcagtccctctgtgtggaactgaagtgaatggtttagcaatagcgatgaagccagtaagtagtaagaatgtctttcatgccaaaagaactctaaccactctgctagaaatgggctacatttttactctctgaaatgtagaagctgtctgctactgtatgaccttcagtatggtttacatgtctaaataaatggaattatttaaccctgctcacacttgcactagtgttttcaaaattgattaagttgtgcaactgtactaaagtgtacctttcttggggtttgaaaatattaaagaaatcaagagagggtaagattattttgcaaaattgctttctcactcttccagataaatattacattttaaaaattacttggtgatccaaagattaaaatgaatgcatttctgtacactccaaatatgcaattccaatgattatttagctactgcagctggaaatacatatatttagggatacagatatgtacaattatgaatacttgggtaattacacattgtaactaactattaatgcatggactaaaatcaaattacctccactgttttcattgttatttagtacttaacaagtatccacttggcactaaaagatggtcaaaatatatcaaacaatgtcagccttccaaaaaggtatcaaaatacttatatcctagatagatacacatatgttgtatgtagtgcatgttggtgtttcaaatatctcattatttaatgtcctgatctgatagaaatgttagatttcaaatcactgtttcacctatcccaacagttacacctgaaattttagaggctaaggagaaatgtctgcaacctacctcctcagttgtgaactcctgtacctgaaaggccaaatcctcctcctcccagcaggcaatcatcttatgccctgaagcatgagatctgattacccctatcatcatcttagcttgcatagatacagatgttattaacggctgtagtttatccaacccttttttaaaacgcagctgcagcatttgacttggggacctcctgtgaatcccactggttgactccgtcttgcacaaagcacgtggggtttgggggagggagaagagagagggaggtttgttttgttttggagggttttttttttttttttttgaatcagagttccctaaatagccactcggcatctttgtaagtgatgtgaattctgaaattacttactagaataggacaacagagtactgtgtgaactagatctgttggaaacaaagcatagtagaatgtatgatgcttttcacttcattggcagagatcaaatatgtggtcctgatatactcatccacataataaagaattgtagcttattctgaaatatattggccacattcaaactggagtacctggttttacataacaattgtttctacaagtgttgaaacagtaatctggataaagtaggtcctaaagctgctgtgaagggaagacagggacgtttttaaaatctgaaaggcctagattggcaatccaggcagatcaaattcagcgattaattggtcaatctaatcattgcctttttctcagcatctatgatttgtgtctctaagtattgctcctgtaggtcatatcatcccttctataaaacagagaggacacctcacaggtttcctataccttggaacacagcaaattttaagtactggcagaaagggaatttagaaaaaaaccctgtgaagtaaaggaggctgacgttgcacaaatactgaactatagtttcaagatgcacaaaacactgttcttaattctaattacttcactagtaagtaagtgaaattgctttaattggagcttctagaagcccttctgggaaatgagaggtagctggatgcagtagaatgcagtggaatgagtatttcaaagagcactggactcagcatcaggagatatgggttctggggatgatctctgtctctcagtgagtaagcaaggacaagttgtctctaaggttctcactttcctcatctataaaatgactacattagaggagtgccttgtaacttatgtgctctgtgattccacgctaaatggaagccaagttagactgtgtaattcacaggaaattaggaggctgaagaaagcttggcagccagtatctccctggatgtagtctgtgttctgctttcttgtttctctagtcattcttttgttttcagaaagccaaaaatgacctgcactgcttcccaaggtttggagattcagaggacctgtccctgttcccttcctaccccattgctggggctgagcaaaaatgagcccttcacctcaagcttcagtagctttcattgagtatcatcaggcaggttcactcatacattccacatttacaaagcaccactatgtgccagggtgcaagggactagaaagatgtttctacttgattattcttggagccagagaatgtcaagatgcagcgggactctagaagcctcggagtctcagcctgactttagaactgaatttttgtccaaccaagggtgtgaataaatgcaaagacatgacttgttatttgttaaggttgtggggtgaggggggtggtcacacagagcattgtctccttgttgttagcagcgttcatcttcctacttgtggggagtaacagactacttttggcaatacagtgctcaaaagtgtcaagaaaaaccctgcaactcaggacccactggattctagagaacaagcgtctcttttctggattgttcttgtttatttggggggtaaatttggataagaatcaaacaacttgtagagagatccacagcagaatcaagagcaagcctgcaaacactgtttctttcatttggcacttagcaagcacctactatgtgccagacactgctccatgacccacctcctctctcaccatccactgggcaaacaacagccataggttgaattatgatgtggaagcaaatgcaaatcaacttcctccttcatataaacaaacaaacaaacaaacaaacaaaaacttgtgtcagaatgtttttggatactaaacatcaaaactcagccaagctcagctggtaggttttcccagcgatttccttggtctgagcatctcttaactctgcatatcggtaaggggaatggtattttaaaggagtgactctctagaggttgaatggcctctgtgaggggtcgatcacaggggattggggaaggggtctctttaacaccaattccatcagctctgctagctgatgggaaagcttgtcctttcaccttcggtattttaatttagaagaatgtgtgtgtgtggagggggtgttaatggaaaaaatgtcaccgtttttagagaagctagtgaatggcagggctagcagtcaacctcagatagtctgaaactttgaggggtgctctgtacccctgcctctctcatacaacctagttaataggattctctttaacagggcactagcagaggaatgagctataatacaatacagtcctcagaggactgtagaatcagtagattctcctaacacaaggccagctttccagggcaattctggacagcctatgtcaccgcacactggtttagggctccttgtatatatctccagtgtcctgtgtttcatcccaatctaaaacatttatcatcttttatgtgtctgctccctgctacatggagaaaggagtcatgtcattaatctgctatatccccagggtctggcatatagtgggtgctcagtatttgatgagtgggtagattgatggatgggcagaaataccccttgatccatggtcctctcatgatcttatttcctatctcttggaccaaaatgtaaacatccttcgataaaagaaccttccctgcgttttaggctttggttttggttgagagctccatactcacaagcgcctacagaggaaattaggggctatgtctgaacctgtttagaagggtttcagaacctctgagggtgtggctatccccaccaccttccaaagcaataaacttatccttgtaacttaaggtcttgtctctgttaaaagataattctgagccagatggcatttgccccttatcaatcatttcctttaatggactcacaggaaaaaatctttgaaagttaagaccgaacagggtgagaatccttttacaaataacaatctggaacccagagaggtctagccactcgcctaaggtcacacagcttgttggcacagccctgaatccctatctcgtggtttccagcgtttagcctggctgtgcctccagtggcccctcagggcatctgcaggtgacttcccttcatttgcccaacatttatgcagcacctactatgaatcaggcagcatgctggggcctgtggatagaaagatgaagagccatagtctttgtcctgcaaaggctttcttctctgagctgtacccatggtagccccaagtttctacgccttaaatccgaggtcccccgtggcctgcagcagctttgcctgagtagaaggcagcccgcactaaggctccaggcttatttgggacctggtgggcgacggggcctcagcccctcccgcctaccctggagcttgttgccgccgttaccactgaaccagtcatgccagaaagtcatcacgatgatttcagaactgtattgtgatttatgcaaagcgcgccgataattacagccgggcgcacagaacacaggatgcatatgctgcgggtgtgtgcgcgcagtgttgtgcctttcgccagggctgaatggggtgtgtgtgtattccgtaggcatcttcttgacaccatgcttgatcggggactggtgacaggaaaaagagggaagatacccattttgattttgagacaatttgatgagccttgggagtattttccagaagttttggtgcctacaaatgagccagcctggcaggagcgttcgagagtaggggaagaggtggtttggagcccaggaaagccatcgtccagcccccgcacaggcaaagcaattagtagttctccttctcgaaacagacccctaaatgcttcccctgcagacaggcctgggtctagtcatcaccccccacactgccctcatcttcgccccagataaattagttccacccttgaagttctttgtcctgaaccaaagaaccccataatcgcgtccgcgttatgggggtggtggtggtaggtggctgaagcaagtggatttctggcgtgaaccagaacctgaggattccaaacggagcctggcatcttattgtgtttctcaaatcctgcccgaaattcctcccctctctgggcgccgagttcgagaaagcgctacgccgccggtcgggctagctccacaagcggctgtacaagttggctgtcaaaaaacgctgatttctcctcctgtcacctaataaacccctacgcgcttatggcctcgtcccacaatcccccaatctcgtcccaattcgaaaaaccgaggaggagggaataaactgagagataaagatccccccatcttgctctttccccgggaccccagccttggtcgcggcgccccactaaggaggacacaggctctggtgtgtgtggtgtgcgagaccccgagctcgaggccgagccaaggctgggcagaaagttgcaatcacgtgctgtcggagcccactggagcgcacagcccgctccccctgggacgcccaggcggaggacctgctgcgccctcccagggctcgggggactccagcattcacttgcacgcacaggcgaactctgattgaaagcccgggatgacaccgagtctggagaaagagggaccggggggtgggctggcggaattgcagagcgccggccacagctcccctccccgcgaacgtcgagcggagggcgggaggtgtaacctctgacctctggccgggtccacgccctgaggagggactggcaagctcttgttcgacaagttcaagctgccgagagagcttaaatagaattaatctcttagagatcggggatcatcgctccctcggcatgcgctctcccagcgccgcgcacagagcaaggcgcgagagagctcaggaatcgcgggaaggcaagcggaatggggagggggtaggggatgagggcctctcttcactattcctccgcccggagagcgggagcccgcaacgcccgccgaggacgagcggcgggagggaacgctctgccctccagccgccccggtgcagataatggaggcgacaagagattcgctcagcgtcggatgggccagctctgcttggggaagctggcggcatcctcccctcggctggtgcccaaacccactgcgcgaaggccgaaggaacgcggaacctccagaagaccccatcctcagccctgactttccgtagatatgtgcaaaatgagtaaattactcacctcgggccagatccaagttttacccaacagaaggggcaccggaccaagaatgaaccaactcacatggccatgtccggcgcgcacaatcacacgccagcacacagccacccaatttcttccgcgaatctatctggcactctggagagagggggaaaagcgttttgagaaagccccgtcacccctccccttccttcttgccgtgaaatatacgaattcatttttattacgagccgcaccgtcctcaccatcacgcacgcacagagccacactcccatattcacactttctaactcgtaagctccgacagcgcctgcattttctttgggagccgcttggaggttcattaatatcattagcatttaaccccctccctcttcccatcccctccccgcacatggctgacgtcagaccccgccaggagttgggggaaaagctaagtgggccagggacgccctattcccctccccgcggctgcctgtcagagcgcttctggagatattacaggggacccagcccgcagcgacaggcacaaagtcacggggtaatgaacttcggggacccttcgccgctgcgtgcgcggctctccccggaaacccggacctggccgcctcttccctcggaagatttcccagcaatctagttttcccactctgcgcttgggttccggcagcgcggagcccgtctgcctctgagactgcggtagtgttttccttctttccttgggagaccagcggtcggcagagattgcccacactctgcatgcctatgtagagggagagatcgaagactgagtgacaggaatggggaaaaagagggatttcgctccgtaggaaggccattttcgtgtctccatctctgtctttcaacatccctctcttgctgttcttccttcttcctcagtcttcctgtccatctctccatctgtctgtccatgtgtgtgtccatatcaagcagcattcccagcagctgcggttttgcaagagccgggaagaaacttaaggatgcttaaatttccactgttggacgaattctgagcgcccagggagcagcgcagcgcgcgactgacacccacctgtcccgcccaggagccttgcaggctggagggcagctggagagcggcggcgcccggcggcgaggcgggcgctgccggccgggactcgggcagcgcccaccaaccgctccgccccgggacagccagcatgagcaagccagccggatcaacaagtgggtacctctcgggccgccgtggggcctaggcgcgcagcctggggcgagcgagcggggaggctgggggaggtcctgcctggagcgctgcgaatctgagcccctgagagggattccagcgggcgtgtgcgttcggcccagacctgtagaccgtgagttggagcatttcgtggagaggggagagccgtttcgttgcctctggattgcttgatcccccctgtctggtgcggtgagaaggttacgacccgcgcagcccaccagtcggatgagttgtctccatttagccgccaggtgctggatgggggggccatgggggcgggaactgggccgcagctccaggcggtagcacaataacacactcgctcaaaactccgagctccagcgcgcaaaagcaactctgtgcaaagcggattttgaatggaatgctttgcaccccgtttctagctatttcaaataatcctgcaaactgggaagcagaaacaatttaaaagtcacattttccttaatcctaaatccgcgtaggtcataactggggaatttaaagtatggcgaaccactctagcaaagagaggaccaaatccctaatcccaaggacttttcgagccggagcccagcagaggcaggagtgcgcggcctgctccctccgtgcgcttctctccttcctcgaacttccttagctgccggctctccgaacgccaggccgcagctgacctctcaccaccccgagactcacgagcgcagggctaagtgtgtgtgcgagggcatttgcttgcaccctgcctgcggaacccaagaatgtgcaggcccgagccagcgttgagcaggcgcggtcacggtgctcagatctcccgggggcatttcagttcccgccatccagtggcccacggctgcgggctccagggtctgaggctggggactaccgttgccgccgcagtccccatatcccgaagttgccttgctgcttgtgttgttttcgcagatagcatttttggcgctctgtgcgttccttccctccccctccccctttcactcgccctcattgtcctgagtctttgaaagttgggagaatcggagatacttctgaggactggtaatgaagtctcacttaagtgggatgcaattcccgccctcctacccccctccaagaaggaggttgtgttttcattttgttttgctttgggtgctgacctttaaaaaattagagcaaaatgaacgtgaacaaaaagaaaaggagaaatgtttcgagctggggcagagggagcagagaaggagccctcaccgcggccggaatgcagagcggaccctggcccaggactgggtttccctttaggctcgggcctaccctggccctcgctgttggaatctccaggaggtaaagcgacctcgatttttgttgcccgcattcccgggcgtgagtgtccttcccaggaggctcaggaggccgtttctgttgcattctgagcctccgttgcaaaaactgaagcccgtgggtctcggcaggcctcctagctcgctcgccccgggacaggccctcgcctacacccctggaagtaaggagccccgggctctttcgtccttttcggggtgtggagcccctggggcccttgaaaggtgaggcctcagaggcgagggaggggtgagcggggagctctgcccgcctgcggctgcgcccccgctgtggactaggaggcaggccaaccctccggactttgggggaaaaaccacagcgggctccttgcggaaactttggccgttctaacttgccaagagcctgagtgaggccttggaagcctccagccccggctcaggtcgggacgcggctgctgagctttctcaggcccgcaggacagcggcccccgccggtggcgccgctgcatttaggccctttccagaccggtggcggcagccaacccgagacttgcgtccctcgggcccggggcagctaggaggtcggcgcgcagcgggccgggtcaggactgggtcgagcagacagagctgcagcccccgccttgcccggcttctcgcggctggagagcagagcgatgtcacccggagccccgcctgggtggtaacgagaccctggccagtcacccctgcagcccagactaacttctttcaacagcctctgatggtaattacagtaatcgaagctgccatatatctttaggcaattatgacacacaaaaagccccgaggggaccccctggcgagggaagttaagaacggttttccagcttcaggaaactccggctcgcctcacgtcggagctcgctcggcttgctaaatgagaggagctttgcaacggggtcaaccagcttgtctcgtgaccccaagtcaccttaacgtggctgggtggcggagtctgaggcacaggcccgctatgccccggaattttcgcgtccctccctcctgggccccgccccagcccggttgcctgtttctaatctgccccgggagccgcggctcagaggtctgctcagaggcaggactcgcactggtggtggcctagagggcaacagtccggaagctcgggcgggggaatccgaggaggggcccccaccctgcactggtcttccctccaccctcatcgggttctccagagatgttgtcatgggcctcctgtccggatgggaagtggggaaaaagagaccccaccactgctcctcccactcactcatcttggcatcttcaacagtgccacagggaagaggacagctggggtgacagtactgctgggccccaaacgtggaccctggagcggtcagagggcgcgtgttaagcagaggatggttgtaagatatggaaaccaagtttaccgcttccagagtgagtgcagtgcagcggagctccagacccggttcctgagcgaccaggaactcccttgggcgcagtgacaggcccgaaggagtggaggacaagacccgctgtgcccttgcctggccctctccagcccctccctcccacagcacaatctcccctcccgccctgtgggaggggggcgccgagccggtggccgccgcgccgcgcgcctcccctgcccgcctttgtcgccgtccgaattcccatgctactctttttgacgggtcactggtggctctataggcaggtgctgccgcggggttgtaattacccggccgagcctggtcgttaccgaacaccccctcacccccaagcacggtcccccgcgctctccttcccccaccccctccacctgagacgagtctgggacccacggtgcaagctcgcccggacgcctcgggttccaggagcaagtttacacctgcggtgcctcgaggccctccccgcgccacgccctcacctcccctactcccctcgcccagacgttccactgccgccccttcccacctcaatcccatcgtagtccccaacccaagcgctttcggcagcagctgtcgaatttcagggaggcctgaggccgctggggcccaaactggaggccttcggataggtagaagaagagaaaagcaagtgttaataagtcaattgttatcaact

SEQ ID NO: 51 - DNA, 2567 bp, Homo Sapiens
tcactgaggcgctacacgcacccaaaaatcatcatcagaaagagaacttgaacttcctgactcagagtctggctcactgaatccacctaagtcccattcagtgctagactcacttggtatttcttcttcttcagtgaggaaactctgaccaggttcaaggcaggaaggataaacacgagcagagaggcaaaaaaagttagaatcaaactgcaagaggcctaatgtggtacctatattaatccattggtctcccctaatatcatattcatacacagtcacccggttctttttccactgtggggtgcgagaggtgatgagcaacaatttttggccatgcttgataattctgtagttgttggtctctgagaccaagggaatattattcatttgcctccattctgccctaactgggttgtagaccttcatgactgggatatcacagatacaatagatctcctcattgaagacgcaggcttcctgaaagtcattgcgcttcagagaaacgcacttcagccacatattgtggctaggatcataacagaacatgcgcttactgttgagagcatagagatagtctcgaattaccattaggtcaaaggataaaaaagaatggggcagtggagccaccaatgcccactggtttctcttaacattgtagcattccacttccttcaacttaactccagtaatagggtctcgcccccccaaaatgtagatatagccattgagatatgccacatccatgccctcacgacacagcaagcgatctgcaagttgctgccaactattctgagctggtttatacacccagaggtctgtcctgggctgagcagctagatagatgtcatggtcaggagagatacagacagctaaagtggtgacagtcctagtgtgagccagacaggtcaaaggtgacggcactttgtaaaggtcccccgagtatggatcacagcagagaaagggatctctggggtgtccaaagaagatcaccatctccttggcacacatacccagtctctggggtggattttctgctgcagatacaagagagttgctgctgctactgctgctgctgctgtttggcactggcaccagagacttgtacaacaggtcaccatagcgcatctgcagggccccttcaataacgtccaggcagtacttcttcacgatgggcttggtcagcagcccttctaagtagtcctgatcttcttcagtgaagtgcatccagcgcacgcacttgaagacttctgcagcactgggaccccgctctttgggagcagcctccagccactgcactgccacatggcacactgtctgctcactctccacgtccagactatccaagcgcaggacagccagcagctgggccagggtcagatctgctagagtctcctcccgaattgaacccatgtggctgagttgcttgaagttctgagctatataggactgggcctgggatcgcagcttgcgatggccaaaggcatctgcaaacttgaggatggcggtgcagttggtcaggtcaagacgtcgggctaagaaggaggcacaggcttcccgcacatattccagctgtagcatgtcggaggccgcgtacaggcgctccacgttggcctcactgagagacacacgacccgtgtagcagtagtcgaccaacacctcgaaggactcggcgtccacatcgtgcatggtcacgctggcctgctggctctcgtacatgccacctgtgaacatgctcttgaagtagggacatgccgcggccagcacattgcggttgcaggggaacaggcgacccgtgccaggcccgctgccaggcgtcaccacctcgatggtcacatcacacagcagccgcgcatcgtagaaggacttgagctgtgccagcagggctgcagaatgggccgtgtcctttaattcctctggacccgtgaaaaaggccgaaactgtgggtttgtgaatcttcttgggccgcttcccaccacggggactggctaggcggcgagagcgcggggcgtcttcccgggactgcatggtggagatggcgacgggcgctgatggcgagaaacgctgcaggacccggctctggctcctcctcaaccttccctcgctgacgctaagatagcagcgtctccgaagagacagcagcacgagcccatttactgaattcaaccctaccccgcagaaccgcctcccgttatcgtttagacagtggctgactcaccctctctcactcccgcgtcctttctccgcgtctgctcgccttcacaggacccgctggcttggagccgcagaagccgctactgcagcgtgggcgacaatgctaggcgcccaggagaactaccgctcccaggttgcctttcgcgccccgagggctgctgggactctcggactcccgggccgagaccgagggaaagaatccgctttgcatgtcgggagtagtagtttgtgtaatatcgcgatccttctctggtgttccttgttttagctgacgacactcgagagcgccaattttcctagattcgattttgtggtttggaactgtggttttggaatccagagtagtcgcctcgttc

SEQ ID NO: 52 - DNA, 10664 bp, Homo Sapiens
gcgtggggggcgtggcccgaagagaccaaatggaggtggaggtatgggctaaactgaactctccaggccacgggaggggcacggctgagggtcccttccgtccccagacgtgatggtgtggtccaatgagcgggtcatgggttgggtgtccgggctgggcctgaaggaatttgccacgaacctcacggagagcggggtacacggggcactgctcgccctggacgagaccttcgactactccgacctggccttgctcctgcagatccccacgcagaatgcacaggtgagctgccgctgggcccggagcatgctgggcgtccccacctcgcagactgcacgctccaaccgccccctccacctcctctttccaggcccggcagcttctggagaaggaattcagcaaccttatctccttaggcacagacaggcggctggacgaggtgggcgcggcaacagctcagagggctctgctcccagcggctcctcgagaggctgagctgagggggcggggcctgactattaatggtcacggttggaggcggggccaggagaggggcggggttaaaggagaggtgagacccggagaggggtggagtcaaaggaaggggcggagtcagacaaggcaggagtccctcaccggctgtccggctcctatacctaggacagcgccaagtctttcagccgctccccatcctggcggaagatgttccgggagaaggacctccgaggcgtaactcccgactcagctgagatgttgccccccaactttcgttcggctgcagcgggagccctgggctctccggggctccctctccgcaagctgcagccagaaggtggggggctcccaaatgcgacagcccttcctcgcttccctagggtggggcatggaccacctcagtagtccgggttctggaatggcctagtcctttctcgcccacccctgaggaatggactgctccaacgttccggactcccccgtcaggatgaaatggataaatcccactcccccttcccagggcgggagtgaactcgcccaatgcgagtttgagtccttggctgcggggaagggagggaaacccatgtggagcccggcgatcgttgtgacatcgggaagggaagtccaaagggaggaatcctggagaggaacagggaggagggtgctccaggctgaaccgctgctcgctctccctccaggccagacttctgggagttcccgggcagacggcgtttcggtccggacctattcctgctagtgcaggcctccaggtgaggaccgtgctgggcgaccttgggggtgcggggcggcacggtggatcttcactgctccacgcgctgcccggcgtcatgcaggtgacctcactcggacggaagaatcttcccgaggctgggctgttccctctcctgcccggactgtggcctcgccggggagagcgggcgggggagctcgcgccgaggactggaccatctgtacagaccagcgggagtgcgcgcgcccgcctcgcacagggccggggcctggaccaaaccacatgaactggactgagagggggaagaagcggggaggaagaaatcccgccccaaacgtccgctttccttttctctactttgtaatttattgatcagtttctgttgggagacgggtgtcctttacccgcgggaagggggcggggcttccctcccgggccgcatgcggggagaggctgctccctcccctttttcctgcccagtcgcggggcccaagtcttccttcttcgtccgaaaggaggggaggggggactcgctgctacaagcctcgccccctgtgccactcagctccgccccgccgcgtccggtcgccggtcccccgggtcatctgcgggcgggttcccctctccctcccccgtgtctcgtgtccccggggcctcaccgccccccgtgctgtggccgtgtccgtgccccgggggtagggggcgcagaatggcgcttccccttctcctctggctccggggtttgcatgggagaatcctctttccacgatgccgctgggcgacgtggcgtgggggcagggggacggtgggggagccctcgcccccgactctcggtcggcctccccgccccaggcgtcactcagtgatcacgggtaaagagaactgtttcaaaaagcttccttgttgactgattttttttttgcggggggggggggggctgttcaaccaaccacctcgagccaggagtccaggcccctcatccctcaagtctaggtccaggtctctagaccctacccgcattccccgatgccctgagattcccagaccccacgtctgacaatgaggtttcggggagcacgtttattcggagaaataaatatagctcgtggaaaggggttggaaggcagggggaggtacacctgcgtcgcagtcgagcgactgggtcagggttccggcgtttccagcatgtctgccagggccctggagacgagaacgccagaagttagacagctggtgttcaaagcccaccccaggacgcttagagatcattaacctgcccatttcatggacggggaaatggagtcccagagtcatctgataactcatagcgagacaagcacttctctaaacggggcttttacacgctccccttttacacacttactgataaagggacgaggagaaatagtcaacgtagcttcctgtgggacagcagagaaaagaggcttgaggggtactgcacgagcaaaattaggcagccactcagtatagcgtgcgagattagtgctagctccacctccttttccctaattccttcttccaactgaatcccttctaccggacccctttttcgttctgggtgattccgttctccagtagccccgccccttcgattcctacttgagttggcctcgcccattaggctctaagcccgcatctcaaccctccactcatttctgtcccttggctccagcaactccacctggtgttcctcgagccaggccccggcccacgtgctcagagccttggccacgcctcccctcttagccccgccccaccagcctaccgggccaggctccgcccccaccaggattcaccacgctgggcccggcaccttcctcaggtttttccagggccccgcccatgctcacctggagcgcagaccgtttcgcagaccagcgggcagagatagcagaactgacagtgctggaggcggggacggggagagagagtgagcgtggggcgtggccgggggcggagttaggatggggccgggaccagacccggaccagaggctaggtctaggttaaggttggagtcaggatcgcttgtggagtcaaggttgcatcaggggtaaggggttgggtcagaggccaggatttagggctgggggtcctcagagggtcccggtgcatcctgaggcccagtggagccttgagtgtgaggtgaggtctcacctggcactggtcgcagtgctcacccatgttctcctcatcacagtgacagctctcacattcagtgcatcgctggggaccgggggagcctggttagatggaaactctaacgccacttgggaggtacccgcccctggcccacccctgcaccctggacgcttccccagactctaccctctttatctctaacactgagctctgtatctgccccccaaaccagcctcccctcccctcccctgcccctggtttccttcctttccctttttttccttttttttcttgaggcggagtctctctctgtcgcccaggctggagtgcagtggcgcaacctcagctcactgcaacctccgtctcccgggttcaagcgattctcctgcctcggcctcctgagtagctgggattacaggtgcgtgccaccacgcccggctaatttttttgtattttttagtagaaatggggtttcaccgtgttagccaggatggtctcgatctcctgacctcgtgttccgcccaccctggcctcttaaagtgctgagattacaggcgtgagccaccacacccggccctgcccctggttttctatctcagggcgaccccatgtctccctgtcagggtgggctcaggtgctctctccacccgctctctgcctattctccccctagcctatcagcccctgtgccatccctccttcccccgactctctttgccacagacccctgtctctgtccccacaccccaagatgcagcttgggtcttgtcctctccttcctggaccactgccccagcctcccagccttcagtctgtcctcacctcacatgcctgcagaaggatctcttttctttcagaactgaccctggcctgcccttgctctgagccctcccacagcaccaccccagggcccctgggacagattctggggacaccttggtgggtggatctgggctggggacatacattgcagaaggagcagtagccacacagggaccctggctggtagttcccatactcctgagcatcctgtggacctgcggggacaggagggcagcagtgacccaggctgactcggttccttcccacccacaccagcccaggccacttacctgtgtcctcaccgctttcctcctcgctggaggcacctccagcctcctctctcctgtccagtgggttggggatgatggtgaagcggggctcatcttcctccagcccctcctcctcctcctcttcctcctcgctgtggtctgggctcagtggggccccaacctcagccctctcttccctcctctcctcgtcttcttcctcctcctcctcctccttgtcttcctcttcttcctcctcctggttcaggctgaggccatgaccttcctcctcatcctcctcatcttcctggtcccggctgccatgatgggtgcctttctctccctgctctgaactttcatcgtcttcctcatgggagccggggtcctcttccttctccttttcctcctcagaatcatccttcctcaaatggcttctatccttgaccactgtgtgtcctggggggtgatggctcatctctttgatggaccctctttgaccatggccagtttcttcatcttggtggctttgcctgtggctgggggcctggtggccaagctcagcagagacctcctcatcttcctccctggggactctgtggtggtgatggtgagggacttctgttttatactcatcttggaagtcctcttcatcactcttgtggcctcgaggttggtggcttgcaacatagtggccgaactggactgtgatctcctcttcttcctcttcctcatctacaaggccatggtggacatgttggggaccctggtgccaacgttcagtggacacatcctcatcttcttcctcgtctctgtggccttggtgcctgtggtcagggacatgatggtggtgttcacctgagacagcctcaacctcttcctttctgtggtcttggtgcctgtgggcctggtgtccatactcagtggagacatcatcatcatcattgtcatcttcttcatggcttcggtgcctgtggctggggtcgcgatgatggtgtccatctgagacatcttcatcctcttcaatcccgtggccttggtgcctgtgagcctggtgtctatattcaatggagacatcatcatcatcatcatcatcatcatcatcatcatcatcatcgtcatcttcttcatggccttggtgcctgtggctggggccatgatgatggtgtccatctgagacatcctcatcctcttcactcccatggcctcggtgcctgtgggcctggtgtccatactcagtggaggcctcctcttcctcctcctcctcctcctcctcctcttctccttcatcatcttccccatcatggcctcggtgtccatgcctgaggatatgatggtgatgctcactggacacaacttcatcctcatcctcgtcttgatggctgtggctcctgtggctggggaggtggtgcctgtgctcagctgagtcttccgtgtcttcactcccgtggcctctgtgcccacgggcctgcccaccatgctctgcaaagacctcctcacctgagacaccctcatctccgactttgtggtcttgggacctgtggcctgggagtaggtgcccatattccttggagacatcttcatcctccttttcacggtctgggtggctccagaaatgatgcccattctctgtggaaacatccttgttctcatctggatggtctctagggctgtggaggtggtggcgaagctctgctgatgcctcctcggagagcccggcgactccagtgctgttgttccggtttctgaagcctagcccatcccctctgagctgctgggtcatggccggggggaggagcaggctggccaccccagcccagaggacagaagcgtgcagccatggcctatggtggcccatggggacggacaggcagcactggctccagctgcctctgcggcaatgtggacaaacgttggggtctttgtccctttggggttggtctctttttttctctgtgtctctcctttgtcctttcggtctctgtccaccttcctctggtccttgctgcctggctctggacacccctctgaggctgtctccggagccccctgacccccctctggggccctccctccccattccccagccaatagggtccttcccctcccctctctccagctaaatttactctcagccctgagttattctgggtcagtccccgcctgcctgcctcctgctcctcctcctcccagctggggaggggaccagtgaggggtctctccctggccaggagacggtggccaagggacttgactttgaactaccaacaagctcacgtttggcagctgcaaagacaaaggctagacttttagcaggtttttgggggagcctggggcacctgggggaggcagaagagacttatcagaggggagagactcctgggacggaaggactgggggttcgattgcggggtgtttccagctggaatgatacgtgctggtgagagagtgatgtcagtattgaggccctagaatggggggaaaggaacatggcccccaacacacgtgcccatgacctcctgtccctggaactcagatctgggggcagggactgggctaggccagggctataaatacagctgggaggggtagggggactcaggttacggaggccacagctgtccccatcacagagggctggcaggagacaagtggccttgcccgtctctgtgtgtcagtatttcctactcctcacccttcatgactgcccccactagggtctcctttcctgttcacgggtcctcctctctcttcaattctgtcatctgctctctcagggtccctgtccctcctccatgggattgcctctccctctcactctgggcttctgtcccactcttatcttagtgtcagtcctcccccaagtctgtgtccctctctctcccctaaatctctggcccctcctttctgagttcctgcccttcccccaattctttggtttttgcatccccctctgccccttgcctcagtcaaggtgtctcctccccatctctggcatccacctctctgggtctctgtccccactctctctcagagtctctgtccccctctgtctcagagtctctgtccacctctccctgggtctctgtccccctctctctgggtctctgtccccctctccctgggtctctgtccccctctctctgtggatctctgtccccctctctctgggtctctgttcccctctctctgtgggtctctgtccccctctctctgtggatctctgtccccctctctctgggtctctgttcccctctctctgtgggtctctgtccccctctctctctgggtctctgttcccctctctctgggtctctgtccccctctctcagggtctctgtccccctctgtctcagagtctctgtccccctctctctgggtctctgtcccctctccctgggtctctgtacccctctccgtgggtctctgtcccctctccctgggtctctgtccccccatccctgggtctctgtccccccctctctgggtctctgtccccctctctctgggtctctgtcctcctctctctctgggtctctgttcccctctctctgggtctctgtccccctctctctgggtctctgtccccgtctctctgggtctctgtccccctctctctgggtctctgtcctcctctctctctgggtctctgttcccctctctctgggtctctgtccccctctctctgggtctctgtccccgtctctctgggtctctgtccccctctctctgggtctctgtccccctctctctgggtctctgtcccctctccctgggtctctgtccccctctccgtgggtctctgtcccctctccctgggtctctgtccccccctccctgggtctctgtccccccctctctgggtctctgtccccccctctctgggtctctgtcctcctctccctgggtctctgtccccctctctctgtgggtctctgtcccactctctctgggtctctgtcccactctctctgggtctctgtcccctctccctgggtctctgtccccctctctctgtgggtctctgtccccctctctctctgtctatccctgggtccctgctgccccaccttctgattctctgtcccctaagtctttgtctccccctctttgggttaaattgtcccctccctgtctggcatcctcctttctgagtctgttccctctccgccactggcccccaactccttctgttcccatctcgcgcttgcccttggagtctcccctgtgtgtctctctccccccggcccggacctctgcaccccccaggtcgctgtccctctgtccccttatcgcggcctgggacccgccctctccccgcctcccgctttggcgtctccaagactccccgccccccagacctcgccccgccccaggctaggctggaaagtggaggatccggtttgctctgggcgggtctggaagcagagccggcggagggagcgccggggccctgggctgcaggaggttgcggcggccgcggcagcatggtggtgccggagaaggagcaggtgagcgccggaccagggtctgcgggagcgcggagctggggacctcgcctccaggctcccagagaggagggcgctggacacccagattcctgggtcagacggaggagggggatgggagggtccaggttccagggtccagggcatgggggtcgagactcctgagtctggagcgggagggcgctgggggcccggactcctgtgtccgtggggagcgcacggggtgggtggctctgtgtcccataggacagaactgggtgccctctcaccccacttccacccctacatttgttcctgtccccagagctggatccccaagatcttcaagaagaagacctgcacgacgttcatagttgactccacagatccggggtgaggagttcgcccctggactgaccccagagggtccgcggcccgctgaccccgcccgcggatggtcacgccccagccctgctccttccccattcctggactcggggaccttcccaagggcgttccttgccgacgctctccctctaggagcgtttgggtctgtgtagacacccctcattccccattcgccattctcccgctcagggtcagtgtagacgctccagggctcggttctgcttctttcctccccgatgtctcttctatgtgcttctgtctcttcgtgtcactttctgtgtctctgtctttcccttttgggtatttctgtttcattcattcattcattcattcattcattcattcatccatccatgcaagaaaccctcactcagcgctcccaaggtccctttagcctaattcaacggccctgccagggttccaatttcccctgggacacgtgctgtgtggcttcgggcaaatcatttcacctctctgggtcccgtttctcatctgggcatcaaaagaggcttgatctcctggggttattatgagaattaaacaagttaatgcttgtgatattcctggcacagcgcccagcacaggacgctgggaaatatctgcagctcccactgggaggtggcaattattaccgcgggcgggccctgtcttggtggccggggacaccaattgagctagatagggtgtgtgcgtccgcgaggagctcccgcccttcagtgacggcctctcaagcggatccaggctttctagtttttttttttttttttttttttttgagacggtgtctcgctctgtcccccaggctggagtgcagtggcgcgatctcggctcactgcaagctccgcctcccgggttcacgccgttttcctgcctcagcctcccgagtagctgggactacaggcgcccgccaccacgcccggctaattttttgtattttagtagagacggggtttcaccgtgttggccaggatgatctcgatctcctgaccttgtgatccgcccgcctcagcccctcaaagtactgggattacaggcgtgagccatcgcgctgggccaattttttgtattttttttttagtagagacggggttgcaccgtgttagccagatggtctcgatctcctgacctcatgatccgccggcctcggcctcccaaagcgctaggattacaggtgtgagccaccgcacctggcccaggctttctagttttttgttttttgtttttttgagacagagtctggctctgtcgcccaggctggagtgcagtgttgcgata

SEQ ID NO: 53 - DNA, 22069 bp, Homo Sapiens
caccggtgctgcgagagaaaccctgagcgctggccggtgagccaggcccagatggggccagatggggcggccgcaccaggccaggtcctccccaatcctgaacccgacgctgggcagagaacagcctcaccatctcgcagtccagggcgtagatccccgggtgggtgtctcctgagagctctttctcaaaggtcttcacgaagccctcaaggcgctccttccggccatcctgcacgtgttgctgggggtggagaaggcaggtgagggcagcttcggggtgcagtgggggcgggggtggcagcagcagcacatctctgagcccttcgggaccatcctatccatccatcacgcccattcactggttgggaccctggtgagcaggtggggaagggggcttgccaagaagacacagggaggacggcttcccaggatgggaagtggccagggacagggcctggggcctacgggtgctacgttctctgggtaacacaagaaaggctgcccgggggcccagaccctgagcccaggactgtgctgtgtcccgagaccccacaccaacgatggggaggcagaagtctgttgagaacaggcagaggggactgggacgccagggctcacctttgcgacttggcagccgacagagccggcggcagccgagcagcacatgtactgggtctcccagcctccggccactgcaggggacacagacacacagtcagggcccggccaggcccactccacagcccccggggcactgaccacctgcatctaccgagccctactagggagtgaggactgaggacaggaggcctcagcctcttggtggagctggaagcagaccaggccccggcagtcgtgtggcagccaggacgcccaggcctggatccagggagaccagtgccctctgcagaggcctcttggcagcgctgccccgggcagcaccctccaggtatccctgaggcgatggctttaggggccgccacagggctgtgcaaggctggccatgtgccctgagcgtggctgcgtggttgcctgggggattgaatagaaccaccaggccaagggtgggacaagcccctccgctcctggggccagcaacctccacatttccatggaccaagggcacaggaaggcagggacacagggcctttcaggtggtggcatttgaaccttgtcatgggaaagctcttgtcttacttttgcataaagaacaggtggagagaaaatgaggccaagggctagccccggctctgccaaagacggtgcagcccagggaccctgagtgggatggagggcctgggtaaagccttaccccagttctgggggcctcaagggagggcccaggttccgggggccatgggtgggaaggggaaggacccgggtaaggccttaccccggttccggcgcagccgtccccagtggtaataacactcctcgtcccggatgcagcggcctgaagaggacacgaggtactcggtgccacagcggcagcaggtcctgcaggaagctgtgggtggggacccaggtggaagctgaggctcacgctggggcccgcatgcccggccttgcccacatcccgcacctgcccacctaggccgtcgcaggccagcgactcacagtccttgggcctcttctcctcagctgtgaagatgattgcgcccccgggccgctctgggtgcgggaaggggtagccgttctccttgagctggtcctgggtgagcaggtactccctgaggcggctgtacagggcagcccctgtggacaggcacagtggtcagcccctgcctgggatggcccacggggcggtagacaccaccgggaaaggcggctgggccggcaggggcccacgaagcaccgtgtggcacagcaggggctgggccggcagaggcccacgaagcaccgtgtggcagagcaggggcagggccttacctttcaggtcctccacccgggggctgcttggacggctgagcgagaagctggtcttggcggccaacctgccccccaacaccacctcgtgggacacaaccctgcggccactggtttctggaaggaagggagggaggggaggagggtgtgaagtagctggctcagacccctgccccgcctgctctcccacccaccctgccctcctcagacctctgcctcaactccccctttctgggacagcaccccactgaccccgggttccagcctgacccgaacaggagaggcagacatgcggtgagccagggacgcagggcagccgccagctctgcaggccccagagctgcacggaggccccacacccaaagtcttcgtcccctcccctcaagcgaagggggaagggcggggagaacagcacgggggatctaatggctttcgagggctttgagccttcatgggccacccagcctgcgacgccaacccagggcccctccgagtgctaatgcaggcggggacgggggcaggggccggtgatagcttaatgcagcctggagaggctgcaatgaaacgcccaggtctccgctttcttcctccccagagcttaatgcatggagctcgcccagccctgggcctcctgctttgaagaagctgccgcagctccattagcaggcggcccctcggctcggcttggagaccccactcagcggaggaaggcggctgacagcgaggacaccagggccaggtccgtcctacacagaagcctgggaaccaggcagcaggcagcccccccacagcaccgcgctttccttttgtctgagactgtggctgagctcagggctgtgaaggtcccagcgagggtcccagcccagctgccaccccaagagcaaccctgagcctcccccgcccacccgccaggactcactgctgaggccgggcacagcgctgggggccaggcccctgagcttcttgagggtgttcacggccacattcaggtagatgttcttgctggggctgcggtcataggccaccttctcctcgttcagtgcctgggggacaggcggtgcccagctgaggccatgcctgcctggtgccggggagccccagcggtggggtcgccatggggtcggggacttgcatctctcccaggcagctccgggtcacagctgcggctgagaggccgggggatgtctggggaccaccctggacccctagtccccacccgaccggccagataggaactccaggacctcaccttctctatggcctcctggttggaggtacagaacttgagacactcctcgatgaacaggttgagatagcgctggcggatgacggtggggactttgcccccaaactctttggggataatgggtttctttaaactctagagggaaggcaaaagctgccatgggtgagggcctccacaaggcctccagcggggaacgcagacgcgatgaggccgtgcccatggctggaggcaagagtgaggtgcgctgggacagatcagcctggctgcagtagggacagacacgccaaggcaagacaggagcagcaggggaaactgagggcagcggaactaaggtcatgggaaactgaggccatgggggcacaagggaacttgctgtactttctgctcaattttcctagaaacctaaagttgctcaaaaaacataaagtctattaattaaaaacaaaacaaggccaagcgtggtggctcacgcctataatcccagcactttgggaggctgaggcaggaggatcacttgaggacaagagttcaagatcagcctggacaacgtggcaaaaccctgtctctacaaaataaaaaacaaaattattagctggggtgtgatgacaccggcttgtggtcccagctactcaggaggctgaggtggaaggatcacttgagcccaggaggtcgaggttgcagtgagccatgattgcgcccctgcactctagcctgggcaacagagaccctgtctctaaacaaaaaaaaaaaacaccaaccaaccaaaaaaacaaaacaagacaaaacaaaaaaacaccgccagggcggtcgggcatggtggctcacgcctgtaatcccagcactttgggaggccgaggcgggtggatcacgaggtcagaagatcgagaccatcctggctaacatggtgaaaccccgtttctactaaaaatacaaaaacagccaggcgtggtggcgggcgcctgtagtcccagctactcaggaggctgaggccagagaatggcgtgaacccaggaagcagagcttgcagtgagccaagatcgtgccactgcactccagcctgggcgacagagcgagactccatctcaaaaaaaaaaaaaaaacaccaaggcatggggagggaaggtgaaggctgtactgcggtgtggagcacgaaggcccgcagggcaggggcgaggctggccctccgcaggtcccatgtggccgggcctcagggcgtggtcttgggggtggtggtcctggccgagatgggaggggctacctgtaaggatggactgtgggcgattcgcttagggatgatggtggtggtagtcttggacgccatccccgacaatgtgcgtgttttcagctgctggccacctggctcagggccgttggaggactggctgccgctggccgcaagggtcctcttggcacctgtgggggctggcggggcacagggggtgtgggcacagggcgagtggctgcccatcaccacgtggcggagcaccaggcagccgcggccgctcagcgccagcagcacgtgcatctccgcgtgcagggggccgggccagggtgaggggctggggctgcgcaatggcatcaggctctagctgccttcaggcaagtccatcgaggcagaggacacaggtcaggctgcggaggccgctgaggacacgtcaccggtggggtggtccaggcctctgccacgtgttctgaccccaagcccaaggcgtcgatgtctgagggaaaggccctggctcccggacagaggaccgaagggtctcgggtgcccccacctgctcattggctttgccctgccctgcggcctctgtgttctgccttgccctttgatgaagtcacaaaccagagggaggaggccaggcctgcaggggctgcttcggagggctggccacgcgggcagctgcaacctgggcatgtacgtctgtgtggcaggggggcttctggactgggggctcggcaccgacccaggaaggggagctgtgagcagggacatctggccctagtctcagagcaacatccctcgaaatgccatctggccctggaaggtgcaagggaggcaggatgagtctgctcatgctaccgcgggccgcccagcaaggaagcaggctgcccgccaggctggcacgcgcctcttgcagtggagggtttgctcttcaggaacggacagagaacctccagactccctcggctgcacgctgggggcgagcccaggcagccacaggagtcctccaagccagatgagcccgccctgcggcactgccagcacttgggacgccagactcccttcaggcggcgggccccaagggcactgcgacagctcagcacccaccacagatcagcaacaggacaacccgagcgcggagacacagacgggaagcgtgtggggtcctgggataggcccaactcaatgatttcccctccctggggctaaggtctcagccgtgagggggctctggggaggggaggtcagagtagcctggagagctctccctaaggagggccgtgggatccatgggatctgcaggggaatcgccggggctggccctaaggctctccagccagcgccagggaggcaggggctccaaaccagcaggctgctcagggtggtcctcggacagcagccatgccctcccagggagcttgccagacacacagacctttcccagcctccagaccagaacctgcattttttaggagctttctgggggaccctcatctgtgacctgcctccagggatactttctcgctctacagacaccactgatgtgaagacgcaggagacaggacaaccccccgtgaagggtcctgtccacccaccactgaggcctggcccgactttctacaagaccctgctgggggggaagtgcccctcggagtaaaggaaatacagccccactcctgggaagacagcactcatttccatcagaggccacgccccccactcacacgccaggagaaagccacacctgcagaagcctgctccccacccaatgccaggtaccccgacatggctccccattccctggaaccacaggctcaggccctggttcagcccagtccccagcaggctgttggactcctagtaaccccggagctgggtcagggaaggaaggtgctgggccaggcctcctgcacccctcaacagtccccatttcacagacaggcaggctgagggccccagggagggggcccaaagtcatcccatgagcaagcaccatgtggttcaggtgagctcagagacctcagggtgccacctctcctgcccacatgcccacggccccccggcacaggccccctgggccaggactcacctgcagccaggcgggggttggggatgtgggcgatcctcctcttctcgccaggggcggaaatgtggacggagggcgacttctctgccagcctggcgggggcctgcagcaagctcgccgatgccctctgcgcctgctgggcccgcaggtagcacacctcctgcgccgtcgggggccgggccgggggcaccgcgggacccctcctcgggggctccacctgcgtcaccacaaatgctaaggcctggcagcacagcgggggcacctggagcaggcgaccccgggcaggcttgggagagggtggctggagctcgggggccggaggcaccacctccctggctgccttctgagctgctgggcacactggggggaagcagcagggggcagtggtcctcaatgccatgtggctccaggctcccccactcccagtgtctcccggtgcccaggctatgtcctcagccctgataaggcacgggtgggcgggactaccccgattacactggcactccaatccaatcccactacgcctaatcttcctcaaagcccctcctctggggaggctctgggactggagcaactgggactctcctggctgctgaccccggagccaggctctctgcttgtcctgcactacctcgccacgtctgcacaggggcctgacaagcgctactgtctccgggctacagaggacactggagctcagagctggacaaccggcccaggcccaggccgcacacggcgcagcaggccgtctgccgcactctgggggaggtcaccctggggctgctgacctgctctgtccctcgccccagcaccgtggcaatctaacaggaaggggcagggccagctccctctggaactcgggcagcgtcaaagataaggtgtcttcaaaaagctcatggaaaacgtgcgttgtgacgaaacttgcatggctttcaagtttttttgccccaaaataaactgatactaacttgtcataacatgtctgaaccagacggagtttgaggcactaaaaaaaagtaagacatcagttagaacagagccccagtcagagcaacaggagttctgctaaaattgaagcaaatgttaagcatcaaatttatggtaaaacttgggtggaagaacgaatggggaaatcactgatgctttacaaaaagcgtcacagatttacaggaacaatgtcccaaagaaatcagaagtttatgaatggataactcattttatgtatttatctttttgagacagagtcttgccttgtcgcccaggctggagcgcaatggcacgatcttggctcattgaatcctccacctcccgggttcaagcaattctcctgcctcagcctcccgagtagctgggattacaggtgcgtgccaccgcgcccagctaatattttgtatctttagtagagacggggtttcaccatgttggccaggctggtctcgaactcctgacctcgtgatctgcccacctctgggcgcagtgcctcatgcttgtaatcccagcattttgggaggccgaggtaggcagatcacgagaccagtctggccaacatggtgaaaccccgtctctactaaagatacaaaaattagcctggtgtggtggtgggcacctgtaatcccaggtactcgggaggctgaagcaggaaaatcacttaagcccgggaggcggaagttgcagtgagcagagatcgtgccactgcactccagcctgggtaacagagcgagactccgtctcaaaaaaaaaaaaaaaaaaaaaaacaaccaaaaaacaaacaaacagaaaacagagggatgaagctgggagcagtggctcacgcctgtaatcccaacgctgggaagccgaggcaggaggatcacttgaggtcaggagttggaagaccagcctgggtgacaaagcaagaccccctttttttataattttttttttttgagacagagtcttgctctatcacccaggctggagtgcagtggtgcaatcttggctcactgtaacctctgcctcctgagttcaagcgattctcctgcctcagcctctctagtagctggtattacaggcacccatcaccatgcccagctaatttttgtatttttagtacagatggggttttgccatgctggccaggctggtctcgaactcctggcctcaggtgatccacccgccttggcctcccaaagtgctgggattacaggcgtgagccaccaaaccaggccaacctcgtctttaaaaaaaaaaaaaaaaaaggctcctgctggcctggcctctgcggaccttacctcctggccttgcttggaaaggtgggagatcctcctcttctgcccggggaacagagtggtcagacccgaaagccccttctcctcactcttctcttccttggggggctaagacacatgtccgtccgtcagcacaggtctgccctcgctgccaacaccaacacaccccaacctcaaactgcccccggcaagtggggaatggaacagtccagcccccaggcacagcagctgagggctcagggccaacagtccctgggctttgtgtgggtgcagtcggaggggtgggcaggtgtcacacgttctgcagatgcccaaggctacctctcctgggcacccagggccccagcttggagaccccagggctgcagaatgaaagcacactgggaaagcgaggccaccttgggccgaaccagctgctgcgggctgagcacttgggctcagtctgtgtggagtgagctccccctggtggccaatttggggacacggggccaggagacccaggggtccagggctggcccaggagagcaagagctcgccacgctgggagtagggaggagggaggggaggagaaaggagccggaggggatgaggaggaggcaaggagaggagacagaggagctggaagagaagagacagagatgggggaagggaggaggggagaagagagggggaagggaggaaaggggaggcgaggggagaggggctagaagggtgtgccggaggtggattcccctgaggtgggtgggtgggccaatatccccctgccagtcagtgggaacagaccgtgtgcacgtggccacagaagcctggctggtggccacgggccagtgacctctgggtgggtgaggggcaacaggagcaacagggctgcccgggtgctcctgagctcctgagatttcaacgggctcagggaccagcactgaggagctgcctccaccccgtgcctccgagccaactggaaaccactccagatagaaggtctctcaccaggccctcggctctgcctctgcccgagcccagccccagcacccgcgcgcctcacctgccgggccagccggcctctgtcctccgtcttgacgctggtggactcgttgaagatccgcaggcactcctccatggggtcggagtcaaagtccacctccttctccagggccgagtagtccacatccgcccccgcgctggaggtggaggaggaggaggaggaggaggaggatggggcgggggaggggggcggggaggccttgagccgcttgggcggcccctgcgcctccgggaagcccaggctggagtctgagtcggagtctgagtccgagctgaggctggggagggcagagggccacacgctcggcacccctggccctgcggcctcgtcctcactctcgtccccaaagaggtcggcgtggctcagggcccgcttcttcagcttgggggcgtcctgggaggcgccctcgtctagtgagcgggctttccgctccactagcttccccgacggggccttggtgctcttcctgtcgggcagctggagggggcggggtgggcctctgccggccgccggtcgggagtccccgcttgtggggctcggccgccgcgctggccggtcaggcctccctttccctgaggtggccacaggagtggccgaagatggcttcttcttggtcccttccggccgctctgccttgcgccgggggctgctggcctgcgggcccttcttgtccgcacggggcttctccacaggccgccctcggcccttgtccttggtcttgtccttcccctgggccccgtctttgcagctgggggcaggtggggccccggtttttttcttcttgggttttccctccttggggcagcccccatcctgtgaggactggacctgggctggggaggcgggcttggctgggggcggctggaggtcccccacgtcgcactgcacggccgtctccttggtctcccgcaggccgcccccctcggcctccaggccctctttggagggtggctgcccggtggccttgatctcagggtcggccctggctttgggggtgctggccgtggtgggctcgttacctgggaccgtggcggcctcatcttctgagtctgagaaccttgcatcgcaactgccaaaggggtcacagagcttcttgggagcaggtgtgtagggctcactgccgcgggagccccggggccgcttggcggcccgctcatcccgggagctggccctgctgaggtgccgggccgagtagttggagagagggtcatactccaggtctgtgggtggcctggagttgtccaccacgtacttgccactgggaacggggcggctgtgccgccggggctggctcacagccttggggacgtattccagggcaccgccaccccctccacctctgccctgacccctgtccagggacgccagcgagtacttgctgcccggctcggcaggggcggccagtggggtgggctggtagccggcatcagggcttaataggccgtggctgccggggctgtagtcgaaggccagtgggaaggcatcctcgtccgggcccacagtggggctggcgttggggccgcggggcgccagggcgggggcctcggcggagcggtgctcacgggtcgtctccagcagctcccggtagcgccgctgctccagctccacctcactgcgcacggcctcgatggcctggttgaccagctccaactccagcacatccgggcgcggctcctcccccaggcccagggtgccattctccctctgcgcggggggcttgggcagctcagggttgtaggggtcgtaacccagccctgaagggaacagagagcacagctgtgaccagcctgccggagaggagcccgcagcatgggggcggccccggtctcaaactgcagggaagggaagagacctgcctccgaaacccaccacgcactggcgcccgccaaggctctggggtgcccagctgggtacaggccatggcgccatctcaggccctgtgccgggccccgccttgccctgaccaatgggcgctggatgggcctgggctgcgtgacacacagctccctgggtactggaggctccctcacacggctcatgaaatgcgcacaatgaccatggtggggtggacactcgacaggctggaactccccggggcaggcgggtgtggagctcccagcattcagggtgccgggctgaggcaggactgggctgggccgacaaccacagcctgacggtggacacaggagagcccttcctcagccaacacggccccacccagccagcagtgtgcccgcggtgtggcggaggtgtgccagcagtgtgccagcggtggtgtggtggcggtgtgcctgcggtgatgtggctgagcagggccgggggatggggacatgcccagttgatgggccaccctgcaaaatccacaggaagattttttttttttgagacagtctctctgctgcccaagctggagtatagtggtgcgatcttggctcaccgcagcctctatctcccgagttcaagcaaacctcctgcctcagccccccaagtagctgggattacaggcgtgcgccatcacacccagctaatttttgtatttttagtagagatggggtttcaccatgttggccagtctcgaactcctgacctcaagtgatccactgcacctggcctactttaaattaattttttaatttcaaaactttttgtagctgggcgcggtggcgcacgcctgtaatcccaacattttgggaggccaaggcgggcggatcacctgaggtcgggagttcaagaccagccagaccgacatggagaaaccccgtctctactaaaaatacaaaattagccgggcgtggtggcgcatgcctgtaatcccagctactcaggaggctgaggcaggagaatcgcttgaacctgggaggcagaggtttcggtgagccgagatcacaccattgcactccagcctgcgcgacaagagtgaaaccccgtctcaacaaaaaaaaatttgtagaggtggagtctcaccatattggccaggctggctttgaactcgtagactcaagcaatcctcccacctcagcctccaagatagctgggactatagcccaagctgctgtgcctggcttaaagcacacggctgaaatgtcttcccggggggcagctgggaacatgagactcgcatgttatttacgtggttccagaacatagtgtagcagaccctcacaacctcaatgccaccaacgtcagcacagaagtcagaaccacagaagcctcccgtggggacaggccgaaggagtctaaagaaaacatgagcaagtggagcccagtattccagcgaagcaataaaaaccaagttcaaatatttactccagaaacttggaagttgaccattagaaattctactgagcacggccaggcacagtggctcacgccgatcatctcagcactttgggaggctgaggcgggaggatactgcttgagctcaggagtttaagaccagcctggatgacacagatcccatctcttaaaaaaatacttaaaaataagctgagcatggtgatgcacacctgtgctcctagctatgtgggaggctaaagtgggagaatcacttgagcccaggggcttgaggctgcagcgagccaggattgtgcctctgcactctggcctggacaacaaaacaagaccccagctcttaaaaaaataaaataaagttccactgaatgtaattccgtaacatctctaaaggtctctaaaggtcaacaggtctgatcctctggagttggcaggaaatggcgccaaagacgtctgcgtcctaattcctggaacctgtagatggtatatccccttagatggcaaatggggctctagatggggtgaaatctcccttgcccgtcactgagggggccatggacaggccgagatcttgcagagcagtttcgcaaccatcccatgcagcttcaacaccaccaccttcagactcggaatcctcagaacccgtgccacagacagaccgcacagggcaggtacagatgcgtctggtgcagccttcactgcaaaaacacaacaataaataacgcaggagatgacctagaagccgaaacgcaggtcacctgtggttaagggggaggcgtgcgccctggagggacctccaagtcacactgctatggggaagaagaggggcaaggaatgttgcacactctcacctttgaaaagcagctccacaaacccagtgagatcagattccaacaaaggcgcacgggcccacaccaagcccgcagtcccatggggtacagcaaatgcaatctggccttcatttatgctgcacccaacaccaactgcccaagagggacgtgaatgctgacacacatccccgacaggctgataaggagctgtgacaccatgtagcaaaaggcaacagccccatgggaacctgcccgcaccaagacgccacttggctctgacttgattctgactgaacgtgcagcttgtctgaaggtcgggcctcaggtgtgtttcttccactcagaaaacctgcctgcccttcggcccacctggagatcgacccccacagcgtgctaagacttccgtgcagagaaatggctggacgcagccaaggggaggcaggcacaagacctcccactgtgggcgacgcagagaacagcaacagaactggaggcttcccctatggcccccacccacaccccctcaagccccagcaggcataagaaagaaatggctggtttcggccggttgtggtggctcacacctgtaatcccagcactttgggaggctgaggcgggcggatcacctgaggtcaggagttcgagaccagcctgaccaacaaggaaaaaccccatctctactaaaaatacaaaaaaattacccagccgtggtgacccatgcctgtaatcccagctactcgggaggctgaggcaagagaatcgcttgaacctgggaggcggaagttgcagtgagccaagattgagccattgcactctatcctgggcaacaagagcaaaactccatctcaaaaaaaaaaaaaaaaaaaaaagaaagaaaaagaaaaagaaaaaaagaaatggctggtttcccaagctgctcccccgagacacacccaccagcagaacaaaagcctccccaggtaagtccccatcctaatccctgggacctgtggccaggccacctcactcagccaatagactgcaggtgcgacttgaacaaaggaccctgagggtgggtgaacatcttgcattatccgggaacccagtgtcctcacagggtcctttaaagagggaggcaggagggtgagagtcagagagactggaaaaggctgtgctgtgggtttgaaggggaggaaggcgccctgagccgagggatgcaggtgcctccagatgctgggaaaggcgggcactgactctccccggaagccttcgggaggcccagtcctgcccacagcttgacttgagcccagcgaggctgactttggacttcccagcccagcgctgagagagagtgtgctgctttaaggcccacggggacgaatgcagcctcaccgggtgatgaaagtgcagtggaaaacagctgcccgctgcctgtacctgcgaaggcggaaggcccctcctgttcccgggaaccctgcagggacagcgggaggccgggacccggaggctgcagaggaggtgggaggaggcctggtcacgggcagctgccgcctttcccttgaaatcacagcagtgttgtgcccatctttaaaattacatttagggaccaggcacggtggctcacgcctgtcatcccagcacggtggctcacgcctgtcatcccaggcacggtggctcacgcctgtcatcccagcactttgggagaccaaggcgggcagatcaccagctcaggagttcaagaccatcctggccaacatggtgaaaccccatctctactaaaaatacaaaattagccaggcatgggggcgtgcacctgtaatcccagctactgaggaggctgaggcaggagaatcgcttgaacccaggaggcagaggttgcagtgagccaagatcacaccactacactccagcctggcgacagagcaagactctgtctcaaaaaaaaaaaaaaaaaaaaaaattacacttagtgccaggctcagtggctcacgcctgtaatcccagcactttggaaggccaagatgagcagactgcttgagttcaagaccagcctaggcaacacggcgagaccccgtctctacaaaaaaatacaaaaaatgagctgggtgtgatggttgcatgcctgtggtcccagctacttggaaggctgaggtgggaggatctcttgagcctaagaggtcaaggcttcaatgagctgtgatcacaccaccgcattccagcctgggcaacagagcaagatcctgtctctaaaacaaataaaattaagtagcatttagacaagaggaaggatccgtgtgtctgttttggaccactcggaactccgcgggactgtgtggagggccacgaggtacgggcaggcaggggaacatcacacagaagccacaggttcttctttgcctgtgccaggctacagccaaggcatttccaggaaacgtcaccccatgtgcccagcaggcgcagaggggcccattctggcaccatctcacagccaaggaccctgggagtcagcgagggcacccaactaggatcagcaactgtggctgccagttcctctgtgcggggagggacagctgccaggccaggaggatgctcccggcagggaaacggccggctggggctgggtgtcagcccccacccagggggagggctgcggaggccagcagcagctcaagggcgccctcccggcccacttcactgggggaggctccggctcctccctgacccagccggctgcagagcacgccaccctgccacccgcctggtgaacagggcaactagtgccagccctcccccagccccggaagcccggctgcccagtgacgtggaggggccaggccaaggccactgtggcgtgagctgcagagattcatgaaggggaggtgacagagcacaattactgaggaggagcaaggccaggtcagggagacactggtctcccctcccaaggctccagctaacggggatgcagagaggaggaagagcccgcctaacgggaaggctctcctccccaggcaggggtgggcagcagtgagactgggccccaggagggcaggcgggggtggaggggactgaggcatctctaaggggctaaggataagggactccactcaggggcttccacctccttgtcctggaccccagggctctaagacacagcctgcaagatcaacccagcccaggggagccaagagtcacaggcaatacacacaccagccagcagacacccgcgagcccttcccaaaggaaggaaattcagacctctggacattgtggactctgaaaggagagaccatttccccaaaaggtgcttttggaaggtcttggaaggaatagcacctgcctcccaggagtggagccaggcccccaagcagagcgcaggacaggtgataagggtccaatctgggggacgtgggcttgtctttctaactggaagcctgtgtgagtacttgttttgttgttttgtggagacaggcattgcccaggctggagtgcagtggtaccatgatggctcgctgaagctttgcctccccggctccagcgatcctcccgcctcagcctcgcaagtagctgggaccacctgcgtgcaccaccacatccagctaattcttttctttttttggtagagacgggggtctcgctgtaattgcccaggctggtctcaaacttctaagctcaagcggtcttctcgcctcggcctcccaaagcactgcttgtcttttaagggctgtgaaacctgccccagcctttagccaacagatgggaaagagcaggggcacctggaggccggagggcacactctgcagagggggtttcagcattttcactcccgggtggaggctgctaccacctccacaaagactgcaccaaaaagaaagcaggcatgctaggcgggtccgagaagactgagatcaggatctgcaccacggcctctcctccctgtggtcactgggctcccccaccctgcagcctgtgacccactggtgctggaaggcagcatcctggcctgggcgctccagccaggtctggaagtttcacacaggaagttgcctggggctcggccatggctgcctgcagctcagaacagggggtacggcgtgctgagcccctgaaaggtcacctgaagctggtacacaccactgcctccctggacctccctgtcccaccatgcctcagagggttggatctgggtacctgtcaggactggaaaggccccagggtggcatgtgcatgctgctaggtgccctgggagcccacccagggggtcacatctaaaggccgagtttgggccaggcgtggtggctcacacttgtaatgctagcactttgggaggcggaggcgggaggatcaccgaggtcaggagttcgaaaccagcctggccaacatggtgaaactccacctctactaaaaaatacaaaaaaaaattagccaggcctggtggcaggcgcctgtaatcccagctagtcgggaagctgaggcaggagaatcacctaaacctgggaagtggaggttgcagtgagccgagaacgcaccactgcactccaacctgggcgacagagctatacatgcatacacacatacatacatacatacacacacacatacataaatgaatgccgactctggaagtaggaggggcccgtccaggccccgtcccacggctgggaattactttggataggagcaggtgggctccttcctggatgtggcccaggtcagtctgtttctgggaaacatggtgaattggctgacaggaaaagcctacctccagaggcctgggagctgccccttcctccctgcttcaccccaaggccaggactgggaggtaccacccagccccagtggtcctgagaggccacaacgcctggctggctatcttccccagcctctccagccagggctcagcccagggcaacgcagcccagccttgtcccggcctaggagagagcccactccctacaccacccatcctgaccgcatctcctgagaccagtgccctgcagccccgggacgggctggatgacaaagatgatatttcttcccagggttctaggtgtggggcctgggaccagcactatctgcccaaggccatctcctggcccccaaaccttcccttggcccagaaacccctcaccctgggcatccactctcctctctgctcccactgcccccgccccaccacactcaatccacccacacagctgtcctgtccccagcaatggggagaacctggcatgagctccaaccccacacggagactgaaaggcagcaaaaatgacaagatcatggagcacgaagatcccaacctgaacttccagaacgttctctagtgagacccgtccaaactcctgtcttctctcagtcagcccatttcaaagatgaggacacccagtgccagcgagagccggcagctcctagccccacaaggagccccaggcccctcccacccagacggggagactcagtggctctaaagaacccggcaggctggctggacacgatggctcatgcctgtaatcccagcactgtaggaggccgagacgggtggatcacctgaggtcaggagttcgagaccagcctggacaataaggtaaaaccccgtctctactaagaaaacacaaattagccgggcgtggcggcaggcgcctatagtcccagctacttgggaggctgagacaggagaatcacttgaacccgggaggcggagactgcggtgagccaagattacgccatcgcactgcagcctgggcaacagagcaagactgtctcaaaaaaaaaaaaaaaaaaaaaaaagaacccggcaggcccagcccctgctccggacaccgttcggtgggcccgcagggctctcaacgcaaccaggcatcagcaggactggcccctccagcccaggcagtgggccccgcatgctggcccagaacaggccaggcagagaccccagatggaaacagacagtccctcccgcctggggcttagctggacaaaaaagataagcctgacactgcggcatgagataagcaagactacccccaacctagcccctgggggagccatctgggcggcctgaggctttgaaggtggagacagaagaggacattcccaaaacagccacagcggcagagaaggcacggggctgaccctcgcgaagcgcaaggcaggggctggttgtgtccacgggagcgcccatcccataacagaccctctgggaagaggggtctggaggacagcacccctgaagtccacctcctgcggacggcagagtaaccataaggtccccacaaatggccatacgtccactctgggggtccctgctcctggggcctcccctccaaccctcacagtgggacgtcctccagccccatccttggacatgcgggcgcccggggccctccatgcacagcccactggacagataggaacccgctgctcagaggcaaagggaccagcactctgcacccagaggaggtcccacagctcctagaccacacggggcagaaacagggtcacctggagagggcttcgaggaaaagtccagccagtgccgggggcctggacctccaccacccagcagcttccaataccctctctgaaatccaaggtggcccagctctgccccaccccccacaccagactccacccaggtctcagagcttgctgtggaggctgggctgtgcctgcagcagcggcacctggggtctaccccactgcccccagggttctcctcgacccccagggctgcgatccgagcctcccctctgctccaaggcaccgccctccccacctcgacagcgcagtgtgcagtgccaggaccgcccagcaggtggagccacacggcagggtccaggggagaaaaagaaaaaggtcccggcctgaccggggaccaccagctctgctctctggggcgtcctgggcatttattcacctcatggggcggccgtccccacatgccatgactggacgcgctgctgtcccaaggcttacagctcgaggctaggggacagggacggtaaccaggacagaggtcactgcctttcaaaacaatgtagaaacaggctgggcgcagtagctcacggctctaatccccgcgctctgggaggctgagcccaaggccgaggcaggtggatgatttgaggtgaggagtttgagaccagcctggccaacatggggaaaccccgtccctactaaaactacaaaaaattagccgggtgtgggggtgcctataaccccagctactcaggaggctgaggcaggagaattgcttgaacccggaaggtggagtctgcagtgagctgagatggcgccaccgcactccagcctgggcaacaagaacgaaactccatctcaaaaaaaaaaaaaaaaaccagctgggcgtggtggctcacacctgtaatcccagcactttggaaagtcgaagcgggcggatcacctgaggttgggagttcgagaccagcctgagcaacatgcagaaatcctgtctctacttaaaaaaatacaaaattagccagctgtggtggcacatgcctgtaatcccaggtaatcccatgcctgggcgcagtagctcacgcctgtaatcccagctactcgggaggctgaggcaggagaatcgtttgaactcgggaggcggacgttgcggtgagccgagatcgtgacattgctctccagcctgggtgacagggcgagactccttttcaaaaaaaaaaaaaaactgaaacagaagggtacaaatggcaaaggacaagaaccggcagggaggagccagcgggaccttctccccctatgcctctccatccctgccaagagcccaccttggctgtgagccactttcatggtccacacagagtaagttaagagtccagctctcagccgggcacggtagctcacgcctgtaaccccagcacttgggaggacaaggctggtggatctcttgagcccaggagttcgagaccagcctgggcaacatggtgaaaccctgtgtctactaaaaatacaaaaatcagcagctgggcacggtggctcacgcctataatcccagcacttcggaaagctgaggcgggcggactgccttgagctcaggagtttgagaccagcctgggcaacacggtgaaactctgtctctactaaaatacaaaaaattagctgggcgtggcggcgtgctcctgtaatcccagctactcgggaggctg

SEQ ID NO: 54 - DNA, 9724 bp, Homo Sapiens
cccctcggcgcccaaggcagggtcagccccactctcaggagacggggggttccttcactaccggggcctttgtgctcccaggcgcatggaggagggcagccccacggtgctggagtctccccaacatggcctgcccaggcagcaccccggcatggtcccctggggctggggctccgggtcaggcctgggtcccacggtacttgaggaaggtgctctccaggaaggcggccagcttcatccggtcgtcctgcggaaggagggaggcatgggggacggaggggcgcggcctgccccgtgcgccccctccgccaggccgcgccgcaccgcccagcgcacctcgtggaggaagccatagtgcacgagctccgaggcgaggtcctgggcgctgtccgctgaggcaatggcgtaaggcgaggcatgaggccgctgcccacccgccgcctggggtcaccgcccgccgcccaagtcccctgcccagcctacttgggagcaggtcgtaggtcagctgccggtgcagccggtcttccagcaccagaagcagagtgagctggggaggcggcggggcgtggtcggctgggggttcagggctccgccacgctcccgccttccccacggcagcgccgccctcccaggccccgctcacatgccagcgcgccttgtcctcgcttctctccaggttgcactgcatctggatgacctgcagcgggggaaggctgggactcacaaacccagcagcaagaccacatgccgcggccccaaaggggccgggaagggacagcaaagactggaaaggggggaatctctaagaggagcccatctcactgctagtggcttggcaagctaaggaaagcttcgagaagagtcgacattaggggctgggtactgaaggctgaataggagctttcaccgcggagagaacaacttgaacaaagagggaactgtgggcgtggggaaagggaggttgggcgggacaggaccgcgccgaagtgcacggtgcctgcgggatcaggcctcccagagcctgggcgtcagctgaggactcccatgatctctgctggcagccaggagcaggcagtttgcctgttaggacatgaattctggctgcactgcaccgagagaggcccctggccaggagggggtgctgcaggaaaagtctggggagacaccaggacatagatgtccgggaatcagcaccaggtgggggatgggaggggtggggggggggtgggaggggtgcgggggtgggggaagattgctggcagggtggaagagcccgggtgagttctggaggaaggatgcttggagtaggttcagggcaggcagcaggatgcaggggaaggatctgaggggacagggagcctcccggaaaaggagagtgcccagcctgtcctataacccccatgacccccacaagggggtcagcctggatctggtctctggcagccaggaggagagctgggctgtggggatgcaggccctaagagaaggaggggcacctcttatctggctgttagaaggtctgagggatggcactgagcagcaggagaggggactcacctttctggtctcagagtcaaagggctctggcgtcggggtcttggccttttggacctcctccgggggtggggccagcacacggggcagccccaggggtcgagtggctgcaaagttcatcagtgggtagattccattcctggggacacaacagggtggctgggggttcaggcctgacagctgcctggcccccaaccttacatcagttctcacctgacatcctccaggaatttgtccagctccatgaaggagacttccgagtacctggcatggaagtgggaggcacatgaggggctggccggggcgaggggaggggaggtgcggggaggggatgtgtggggaggggaggcttctgggtgctgactgctcaccgccactgcagcgggggcctgcggggccggggaagctccgccaagaccgcgtgcaggtccatggccttggtcttctcctccaccacattctcaggcatgaggtctgcggccacaagagcatcaaggcggtgtgctcaggccgtgggtcctgcagggccccttccacgtcccaacctccacctccccagccaccccccgggccggcctgctgctcacactggtgctggatgaagcagtgggctgccaggagcttcagcgagtgcacctcgaagagcacgcggtggaagaggaggctgtgggcagagggccggcgggcagggtcccgggccaggcagcaaaggatgaactcctggggcacagggaggagaggctggtggtgtgcaagggctctctgctctggccccgcagttcgaggagaggtggcccctgagttccccatgtccctcctcagggacacacaggacatgcagggatgcccatagggaggagtcccagcagcagcagccaggccaggacctggtcctctgagcttgaggacagctgggttctgggattggagcaccatgctctgcttccctcgacccccaaaaaatcgtggggagaagccatgatcctaaagtcacacctgcaagcctcctacccatggccttttgatcggctcagctcgggcccaacactggagacgaccttgatgggtccccactctgtccacatccgtgcccagcccggctccagctcgccaccagccccgaccaggcacccccatctcctgaggccatggagttaagtctagactccgagcagagggggctgtggatgcagcttccatcccatacctctttttgcctgcttggcacccaccatgtccccccacaagctggagcctcatcacctcctggaagcttaaagtcaaggacttggagtgaagcagacccaggtgcagatgttggctccaccactcactctaaagccttgggcaaaggactcatctcctctgaaccttggtttctttataaaacgggcatggtgatggcagccacagagggagggtctctcttgccttcttgtccttagaatgtgctgaccccttagggccttcaggcctggaaccagtatgtgctcccactgaggtcctctttgggaggggtgcagtcagctggtatacccctcaactgcacaaactgtgatgttctcccaggtctgcctggagcaccttgctagccctagctgagcacggtgagccagctggggaggggcagggcaagctgcttacccgcatgttggggtcactcagcgagtgcctggcgcgagcaatggcctcctctgtgacccgggtgtccccattggtctggatttccagtacagccatctggggcacagagccaggtcaggcatggggaagggaccacacaggtgagccaggcagggcacagttaggaggagggcagagcacaaggtggagggcgggggcagtacctccagcgcacacatcccaaaggagaagatgtccacagcggtcccatcggccacctctgaacagaagagagcacaggacacgtaggagagaagcgcagggtaggcacggggcacccggacccagcaccactcacctccatactctggggggaagaagtgcaggttccgaagttcctctcgctcagcgcggatggggcttcggagatcatctggaagtgctgtgggagggcgcagagctgagcgggcggggacctctccaggaccccgtccccccaaagtccgcacttaccattggagaagattcggtgccacactgccaaggggcgggagaaagagtggagttagctgctggggcatcagaactcctctgcccttggctccaggcaccttcccctgccccgttcccccacccagccctgccccgccagcaccggagccgatcttgatgaggccgttgtgctgaatgaagatggtgtcgctggtcaggttcccgtggatgattggggggctgcaggcgtgcaggaagctgcagacgttggggaggggagagtaggaggagccggtcaggaggctctggagagatgggggctcggtggcgccgcgcccaggccagcccaggccctcacctgagcgcagacaggatctgcgtgcaccagcgcttccaggcctggcggcggacgcacgactccgtcggtcgggtgggcgcaggagaggcggctgggcctgcggagcccgccccgcatcctcgcccagcccctgtccgaggccgccgggcaccccctcaccatcccagtccccgaggctgccccaaccccgtcctgtccccgtggctgccccagcccgctccccatacccgggcgttcatggccttgtggttcttcttggtctttttgaggaattgcttgaggctgcctgatgacacgtactctgtgatgaagatgacctgcacggtgcgagctcaggatttccaccagctgcgggttcgtccccatgcccgccccacctagctgtggtctctgcctgcccggggccttgcccgtgctcaccctcgcgcaggcctcagaggtatccagccagtacttgtgcaacttcacgatgttcgggtggtccaccagcaccagctgctcgaacacggtctggatcttctcctggggagggagggtggtcgctgggtggtcagcaggtggtcacccaagcaggatgaggagggggcagcggtctcacctcgtgcgccgcgaaggccttcctgtctccgaagtggagctcgttccacaccacctctaccccctcctccgtgtccatggctaggaaggtgctctgaagccctggcatgttcccttggtttacctgggggtgaataaagggttatgtgtgccctggtgtgtgtcagggttgtgggtgaggatttggtccctgtccacacctttccagtgggcccaagcgtgggctgcaggccctgagccactctgcgggaaggtggggcttggagggtagctgcccccaggagccaagggctcctatccaagggctgggctaaggggatttggagcaggtttcagggggtcgagggggatccccaggaagctagcggctgagtccagaggcatggggaggtggtcctgggaggagactggccctcagggagtcccagggcgagcgccaggccaaaggggtccaggggtggctgattcgcgggccgcgaggggccgcggagaggtttccagccgccgcgctctcccagcgcccccacgccccgcgcagcctccaggcccctcccgctctgggagggcggtgtcaccccgtgccccaacccccgcgcccacctgctcccgtcgcttttgccagcgaccacacgggctttcctccaggatgtcgctctcgtcctcgctctcgtcctcccgctcccgctcccgttcccgggcccgcctcggcgccggctccggggccgccatggttcggccagcccaggccaccgccctctgcgcgatccgccgccggcgcagcctctcccggcccgccctggcctcgcgcccagcagcccagcctagagccgccgcggcagcctagagccccagccccggctctgggaattgggaggcgcgggcgcgcggcggacgggcggggcccgggggcggagccggcgcgcacctcccgagccgcctgtgcctgccggagccagagcagagcttccccgagagctgccgagcccgggccgcgcccaggccccgcccccccggaggccccgccccgcgaagccccgccccagtccctgtttcctcctcgtctcccaggcctgctccgcgaagcccctccccaggccctgtcccctcctcgtcctccaagcctccttcgcgaagccccgccccaggacccgccccacccccgcgaatccccgccccgttttagtccccgcccccgcccgttcccagggtcctccgcgaagccccaccccaggccccgcctcacctcctcgaagccccgcccctatgaggccccgccccgcgcagaggaaccgcccccaaatccccgccccctcggaggccccgccctgcggacacctggagcccggagcgcccacttctctcgcggttgctcccctaggatctgggggaagacccggggcatctgggggcccccaagcccacggcaccctccagctgcagaagaccccgcgggctcgaaagcgggacccgctctcctggccacgcactcattccccggccgacccccaagggacaggtcgaaggggcaccgagggcgggggaaaggcccaccagcaggctgacccaggctgactttgatcggtgaccacgaatctctccctggcccgcccaccagtgcctcctcccgcccacaagcccatcttctcactttccaggatggcgattttctcttttctcctcaaacgcgcatttcctttccgcggctggctcccatgggacagtggaaccatgaggggggagcccacccggctcacacgacctctccctccggaggccgctctaagcacaccctccagccacgccgaccaccggggctgtccccgattctcacctaaaacccccttcagcccacagcccccacggccttcctgtggtctcctccctccttcacggcgggtcctcatcctttaccttctctctctggagcccaaattggaactccgctcctcccctccgcgcagctccatgcactggccctttgggacgcctctttctttctttggcagaggtgcatctggccctgctgcgtcccctgtggtctctcttttctgaccagccttggtcaccaggcaccttgtgtgtggtttccaccaatgccaggtgatcctgctgaggccctctgcagtaaaggtttggggtgttcaaatcctccaccctgaaactggccctgaccagctcctgggagacaccctctaagcccttggaatgttctgcctgatttgaatgtctgtgtttacctcggccacaccagattctatgctaagcttgtccaacccgcagcccagagggtgcattcggccaaggacagctttgaatatggcccaacacaaattcataaactttcttattgagattttttttaaagctcatcagctgttgttagtgttaagtgtattttatttaagggtattgcccaggacaattcttccaatgtgtgccaggaaagcccacagattggacacccctggtctgtgctaacaatatggtctacggggggaccttgggccatgtggcatcagcctgacctctgcaggggctggaggccaaagtcagccacctgggaggtcagccatgcctgtgtgaccaacccaataaaaaccctggacactgaggtacggagggcttccctggctgctgacatgctgtgctcattgtcacacctcagtgctgggaggttgagcactgtccccatgcctgcagtgggtggggacacctgcagacccgtgctggtctgtcctgggttctgttctgtgagtccttgccactgctgattttaacgcatccattgctgtaataaatagtaccctttccgagttctgtgagtccttctagtgaaccattgaacttgagggtggttttggggagcccccccagtggtcccttctcacttggtatgagggcctaaacatgaaggcccagtaattggtcccattaccctacctcacgtcagctgccttcttcagctgagcccaccccaagtacacggccctgtgccatcggacatgacaggcacttcccctcagggtctctgccctggttatacctttgcccggaacgcccttcccaaacatcctctgaggtcacttcctgagaggcctgtcctgaccacgaatcctgacatcacagtccccacaccctttcgcctgcttgacttgacttttcccggagtattcaccccacctgacttgcatctgggtttttctcatctctcttcttcactgtctgtgtccctgttgcgattcgagctcccgcagggcaggagtgtctgctcgttgtccctgctctttctctggtgcgaggacggtacccggcacacagcaggccctcagcaaacacttgttgaatggatctgtgggtgggcaggggtgcgttttggcgggtgtggtccagagaagcccctaaggaggtaagccttgagcagaagaatctcaatgaatttcctcccctttctccgcccccataaccagacacacatgttctgtggtaggtcacatagtgtcccccaaaagtctacatcctgatccccagtacctaggagcacagccttatttgaaaaaaaaaaaatggtctttgcagatgtaaataagtttaggatcttgagatgctggggtgggccctaaatccaatgtttgatgtccttatcagagaaagaaaagggatacttggggtgcagagaaataaggtagacagtcacatgaacatggaggccagtgttggagggatgtacccacaggtcaaggcgtgcctgggactcgaggacacgagctgttccagtataataaaatatataaaataagaatagttgtactgatatagatcttagatatgattatatatgaatatcattaatcattagtttgtagcaattactctttattccaatattataataatcctcactctataatcatagcctaggaaaaaccaggccatacagagataggagctaaggggacatagtgaggagtaaccagaagacaagagtgcgagccttctgttatgcccagacagggccaccagagggctccttggtctagcggtaacgccagcgtctgggaagatgcctgttgccaagtggaccttggtctagcggtaggcgcagtgtcaaggaaaaacacctgctacttagcagaccgggaaagggagtctcccttgccccggtggagtttaaagaagactctactcctccacctcttgtggagggcctgacattagtcaggctcgcctgcagttatccggaggcctaaccgtctccctgtgatgctgtgcttcagcggtcacactcctagtccgccttcatgttccatcctgtacacctggctctgccttctagatagcagtagcaaattagtgaaagtactaaaagtctctgatatgcagaaataatggcgtaggctgtctttctctctgtctcctctctctctctgcctcggctgccaggcagggaagggccccctgtccagtggacacatgacccacgtggccttacctatcattggagatggctcactctccttatcctgcccctttgtcttgtatccaataaatatcagtgcagcctggcattcggggccactaccggtctccgcgacttggtggtagtggtcccccgggcccagctgccttttcttttatctctgtcttgtgtctttatttctacactctctcgtctctgcacacggggagagacccaccgtccctgtggggctggaccctacttgggactgccagggccatgagtggtgaggagagagtcctgggatggattctccctcggagcctccggaagcatcagccctaccgataccttgattttgcacttccagcctccagcacagtgagcgaatctgtttgtgctgttttacgctactcctccatctctggtgctgctccagcatgacccccgtggtaagaacagtaacgtgacaacagctatgtgttcgcgtgcagggatgcgtcccagcatttattcccatgcacagagtgggtcgtcctactgcctgcccacgcacagaagtggtggccgctgcggcacaccctccctggcctcactcaggctgtgccccagggcgggggcgtaccctcccttctgctcggcct

SEQ ID NO: 55 - DNA, 1301 bp, Homo Sapiens
aagtagccggtgtcgcctctgaacacacccgggcagggcgagcaggatgtccttgtccagggagaccccttctcctggctttggggaaggtgctccctatccccgcaggaggctgggtctgcaggacgcagcactgggcgggtgagagaaagcctgggcagaagagcacggagccggcgactggacgcgagcaaggggcgaatggagagcgtctcccctgcgccaatgctgttgttccgggtgctgaaaagccgggaacttcccggaaagcagcggcacttttctccctggaaggtgggtgtgggggttccaggcttcgcacctgctaaacctgcctcgtcacctgggaggggtccgccagatgtgcccctcctcagccccattttggggagaacgatgggggcgggggcgtgggggtgagcacagccgggcacccccgcacacccgcaggcgggaccccggggtgcccttgccctcctctcctgggcagccgcacgccgggatccccactccacctgcgcgcgaactttcgccatctgggactcaagcgcccgcggcttgagcgctgcggtaaacagaaggcacccgcgtgggttcccaagggtgtttgtgtgttgggtctgggggagcatgatcggggcattcgcagtggggaggaagaggtgctgctggccggggcgagctgcctgtgctaaggccgctccctgcagggcgagttcgtgcacgacgacgtgtgggcgaccgtgaacaaccccaacgtgcggcccggcgggcgccccgctccgctgaggcatcttcaccaacgacttcttgggccagggcatggccgagaacaccagccacaagtcctagcggccgctcagcgtccccaccttcaagtgcactcctgtctagggcttccctttgagccagggccgggtgtagttgcgggactggcttgaagggaatttctatttctcatcacgccttggcctctctgcctccctgcctctcccactccagctgttcacgccaccaggctcccaggtcctctccaggctaatctgggttcctgggaccaggcgggaggcgcgcgctggggagttcccttcgagtttccagagtttcccgaggtgtctgcgttctaggctgtttgttttctctggacagacctgggaatgggcggctggagcggccacctcacttcccttccgccagcccctctgggtgagcaagaaaaccagtcctacacagttggccccggaggtgtggtgtgtgtggaaggggcgggggaaatgctgttttcagggccgtaatttctc

SEQ ID NO: 56 - DNA, 22355 bp, Homo Sapiens
aggtgaacacatagcaccccccgggttccataccagccctgggcgccagggacacagcagtgaatagaacagatggagcccctctcctctgtagcggggggctgcaataggggggcccactggacaaggagcacattcccaccagagagaacattctagctgggtgagcggccctgcagggggccagcctgggggaacctctggagacggtgggaattgaacaaagcctctggggaggccaggcacggtggctcacacctgtgatcccaacactcggggaggttgaggctacagggagccatgatcacaccactgcaccccagcctgggtgacagcgagatcctgtctcaaaaatttaaaaactgggccaggcgcagtggctcatgcctgtaatttcagtactttgggaggccaaggagggtggatcacttgaggtcaggagttcgagaccagcctggccaacatggtgaaaccctgtctgcattaaaaatactagagattaggccaggcacagtgactcacacctgtaattccagcactttgggagaccgaggcgggtggctcacctgaggtcgggagttcgagaccaccctgaccaacatagagaaaccccgtctccactaaaaatacaaaattagccgggcatggtggcacatacctgtaatcccagctactcgggaggctgtaatcctagctactcgggaggctgaggcaggagaaccgcttgaacccgggaggcggagattgcagtgagctgagatcgcaccattgcacttcagcctgggcaacaagagcaaaactccatctcaaaaaaaaaaaaaacataaaagattaggtggaggttgcagtgagctgagatcgcgccactgcattccagcctgggcaacagagcaagactccgtctcaaaaaaaaaaaaaatttaaaaagcgtcttgaaggagttggggggggagagaagacagggccgccagggctctgagcgcagcgccagcctgtgtggggcatgcaggctgtgccccacgcctgtgttgggagagagagtagatggggtgcctggccctgtgagtggttgtgagtatgtgtgtccgagggcaagggggactctgtcccggctgcatgggtgttaggtccacggcatgccccgggtgtgtgttgtgcgtgcgtgcacttgcacggcatgtgcgtgcatgttgacatggcagccggtgcacctgtggctcctgtcggcagacacgtgccctccagcctctcgctctctctcatccgttctctttctcatcctcaccctcttgctctcactccaccctcctgagctgccatgtggccatcaccacctctgtggcctctgttctcagggcctttgtgtacctccttcccccagtgcctacctgaaccctcccttccatccccccatgctccagtctgtggtccggcagcctcctccccaggctccggggccaccctcggaaggcctggtgggctctgtcagggaaggggcccacaggactcctcgagggctgtggtcgtcaaccgctgagtgcagggtgtgagcgggactcggatactctctgagggcgggaactaggcagtgtctcaagagatgccaggtgcacaggggttgggggctgggttggggggagcacaggccctcgggagccagaaggggactggggctgtggctcaggccatggacagagcagaggcgcagggacctgaagaagcagagggagaagcctggccaacatagcgagaccccatctctactcaaaagacaaaaattagctgggtgtggtggcgtgtacctataatcccagctactcaggaggctgaggcaggagaatcacttgaacctgggagggggatgttgcagtgagttgagatcacgccactgcactccagcctgggtgacagagcgagaacctatctcaaaaaaaaaaaaaaacagtgggaggtgacgtggtgctgcagaggcggcagtggccaggacagcgggaggggcacgggaggtgaggcctctaggccagtcatgaacgctgggcctggctgtgtcccaaggtccccagagcccttcccctgctcctgcctggtcctccaggaggggagctagggggcacagctcctgcaggggctggcaggaccagataggggcaatgctgggcctcctgcattgggactgaggcgtcttcctgcccctcctactggctgagatcagggtcctgggcacacgggagggacggggtttagctgccagcatggagcgggtttgtctgttcatattagtccctgggcaccagtcaccaggagcctgcagaactgtggggagaaaaggtggacgaggcaggaggaaaagaggggagaggggcttgttggctgagggctttggagagcggcaggccccagctcctgtgggaggggcaccttggtaggtgtgtgtagccgttgtcagggcctctaggatgtgacgtgtcaggattggctcctctggaggccacgttagcatcccggcctctgttcctgcaccctgttgccagcccagccagggagaccctagctcctccgggaagctgccctcctgtcccaggcccctctctggcctgtctctgcagcgcctcctctgggcacctgggccctagtcttggttcctgtctgtctgtctgtctcctgccctcccacccctaatgccgcctgcccaccccagggtgcctgctgcctgcccgccgcctgcccacccgctgtagcatgcccgagctgcccgcatgcaggctgctggatgagccaacccccgcctggcccagcattggccccacctggtcccgccagcccctgcaggagctgtgcccccgagctctcctcccagaggatgcaggccccctgaggtcctgtcctgcccccatgggccccagctctgcaggccaggccaggaggccctcatgtcagcccactggcccgaggggggccctccctgaccccggaacagaagatagggcaaggcagcctgaagcctgggtctcgtgcccgctgcctccccagcgtggccctgctcgctcttgtctgggagccaacttcagtgctaccagcagagccacagcctgggccagccctggcaggcactccgccctggcctatccatcctgtgggtgctgtggccctgggcctgcttcctgggcagaagtgggaggaagtgcacacacctgtcagggaggccccctggccgagggacacctcaggtccccatctcgtttctccgtcagcgtagacttggggctccctctcccctgctagcctcctccatctctttccaggtcaggggatgagacaagggaccctgagaacagtctggggtgggagggagaccccagctcctccagcccagcagggcagggggctgtgccagcctagctcgggaaacccaggaggggaaggtgagggtcccgacccctccctggagtgccagatgtggagctgacaccagctgggcgctgacccccctccctgccactggttctcacccccctagccctgcagctcccgctggccaacgatgggggcagccgctcgccatcctcagagagctccccgcagcaccccacgccccccgcccggccccgccacatgctggggctcccgtcaaccctgttcacaccccgcagcatggagaggtgagccaggggcccagcagggttgggtgggaagcagcattgaggggccaccgtgccagccctgggaggagggtggttaaaccggtgggaaccccggtatgggggactggggtggccaacctaaggtcaggacccacctccaccggcacctgctccatgtccccagcattgagattgaccagaagctgcaggagatcatgaagcagacgggctacctgaccatcgggggccaggtaccaccttcactgtggcggggagagggaggaggcccagccaggctggacccatcctgggagcgccagtggggggcagggggcggtggcagaggccccagggaccctccaaccctccctctcctcccagcgctaccaggcagaaatcaacgacctggagaacttgggcgagatgggcagcggcacctgcggccaggtgtggaagatgcgcttccggaagaccggccacgtcattgccgttaaggtgagccttggcggctaccccggctgcgccccacaccccaggccggtgctgaggctccctcctgtccctgcctgtgcagcaaatgcggcgctccgggaacaaggaggagaacaagcgcatcctcatggacctggatgtggtgctgaagagccacgactgcccctacatcgtgcagtgctttgggacgttcatcaccaacgtgagtacctggccgcgccctgcagcgtctcctcctccctcacccctgccccttcctagggagcagagcctctggggggtgggccggaagacacagctcccccgggtgcccctctccctgcagacggacgtcttcatcgccatggagctcatgggcacctgcgctgagaagctcaagaagcggatgcagggccccatccccgagcgcattctgggcaagatgacagtggcggtgagtgaccaggcggggcttgcactgggcaggatgacagaggcggtgagtgaccaggcggggcgtgcactgggcaagatgacagtggcggtgagtggccaggtggggcgtgcaccgggcaggtggccttgggtctgtgccccctgccacatgcacccccctctgcgtgcctgcagattgtgaaggcgctgtactacctgaaggagaagcacggtgtcatccaccgcgacgtcaagccctccaacatcctgctggacgagcggggccagatcaagctctgcgacttcggcatcagcggccgcctggtggactccaaagccaagacgcggagcgccggctgtgccgcctacatggcagtgagtgggggccccccagcgggggagggggtgggggctgggaggccggccccagccttggagatacgtcttctcctcccccccctgcagcccgagcgcattgaccccccagaccccaccaagccggactatgacatccgggccgacgtatggagcctgggcatctcgttggtgagttggggccctcccctgttctccagccaggagtgagggcttctgggggactcggagggaggagaacataaacctgtccagccctgcccgtctccctcccaggtggagctggcaacaggacagtttccctacaagaactgcaagacggactttgaggtcctcaccaaagtcctacaggaagagcccccgcttctgcccggacacatgggcttctcgggggacttccagtccttcgtcaaagactggtgagaacctccctccacttgggaggtcagggacagcccgctgctctgggcagctggggaggcaatggcaggaggggaatggaggccgcaccctgggatgggcggatgcgactgtgggcgggctcctggctggcggctgccacaggagctggagctggtgcccagggagccatgagctgggtttggacctagcctgaggggacagccagccctgtggcatttggcggggtggctgttggagattgtgagcacgcttctgcaacaagcacagctacaagttcaggagggccatgttcgattctctcaggggagccccacccacctttctgggggacctcagccagctctggccccccaagccaggcccttgccacctggccctaggccaggaggctccgggactcacagttgctccccgctgtcagccggggtcctgaggacatccacagctccttcccccacacacatcttggggacccctggccccttggggagggcctgagcacaggggtggggccggcatcccctcctccctcgttctcacatctgtcttcccttctcttgctctagccttactaaagatcacaggaagagaccaaagtataataagctacttgtgagtacctgagccctcccagtccccgtcctgtccctgcggaggcgcgaggccaggagggaagaccgtctcctcctaagccccaccccctcgggcccacaggaacacagcttcatcaagcgctacgagacgctggaggtggacgtggcgtcctggttcaaggatgtcatggcgaagactgagtcaccgcggactagcggcgtcctgagccagccccacctgcccttcttcaggtagctgcttggcggcggccagccccacagggggccaggggcatggccacaggcccccctccccacttggccacccagctgcctgccaggggagacctgggacctggacggccacctaggactgaggacagagagtggggggtgcccacccaccccccccgccccgggcctaccaagcccccgcccttcccaccccggggtcagccggccgtgtgcgtcccccgacagacactgtgaacggaagacagcaggccgcgatcagagtcgctgttcattcagccgcagcctctgggccggggcggcccccaggggccaggagagagccctggagtcccgcagccaccatgcacgctcccagcgtgctgtgtccttcgccactcccacgcgcccgttcctcttccgtcgccctctgtcccctgctctacctctctgtccttgtctggctctcccgtcaccctccctgcctctgtctctcttctggcctgagcctgggcccagccacctcctgacgggtcccctgggtctgcataggtctcccatggcgcaatgagtcagtggcccccagccaggcagtgtgggcattgccactgcggctggacggggctgcgcgctcgcgctctctctctctctctctctctctctttgatctcagggggtcctttttggagtttattgtattttattgtacttggtggggtgtttggggtgggggcggaggagagcttgttctcgtggggttgtcggtaccttcagaaacttttaccaaagtcacgattagctgcttgtggtggggccccaaccgccctcgggcactggggagctgggctggggctgctgctctggggtctccgggggccacagcttggggtgagttgaagacctcaggggatgtggaggggtctgcggggccctggccgcacaggatggccttcagggaaggtggtcttggggcatggtgcagagcaggtgaccggagggaatcggtgacggagcggggccaagggaggggtccggagggagtcagggatggagggcagagggagtggatgtgggggtttgaggacgtgtgacaagctccagcaggggtgggggccgggctgagggtgggggtgcgaggtggtcactcccatcgtgcccctggccgtccctccactcacccacacctggcccagtccacgttgaggtccaggactgggaaggaccgggtgagtgcaccggggacccaggccaggtgccccccggagcctgctggggtggccagagcaggagggggtgtgtttcctttttgtgggtgttgcatgcaaatcaagtggacaagaaaaaataacaaaacaaaaaacaagaaaaaaaaaacacaaaaccccgtaaaatcacaaagaaaatccaacaccaaaggcgcagaagccggctggccgtggtgggggcagcgtaggcgtagcatccctctcctctcacttagcctgttgactcttgttattatcatgatattcacaaaacgccgcatgtttaaaaagtcatagatgtcatcttctctctgcccccagggaggaaagccaccttctcttgccccttggcccctttgtcaggggccaggggtctgccgggtgggggtgccaacaggcctggccctttcctcccctgcatccagccatgggggcctctgcgattgccggaaggttgcatggctggtcccagggccagcacaggcccgaggccgggctgcctggttttatttttatttaactttattttctgttttatgagtgtgtgtccgcccacccccacccccttcagtgttaagtggggagccctgggggagtctctcctgcctcccagcctctcccaagacctcccccctcgtcaccagccatccctctggaccaggcagagggcggaccgggtgggcaggggcctgagggtggctcgggccagcccaccagccaatggacccctcctcaggccgccagtgtcgccctgcccctttttaaaacaaaatgccctcgtttgtaaacccttagacgcttgagaataaaccccttccttttcttccaccgagtctgtggtgtgtcatgggcctggcagggcgaggtgggaagggggtggttgcggggggaggtttctgcattgaggggagactgaggcaggtttgggagctagacgggaggtgtttgtagtgacttgccgatgggtatcaagcagctggtgtaagggaccccctgcccccagtggccacaggtcgggcagcagaggatcccttaatcccctcaggccttgggcattggctctggtgtcagcccctcagtctgccacccccgctccctgcctccctccttgccaaggacagggccgcctgcccacgtgcgggacctgggtgcagcccagctggtgtctgctctggccccaaacactccgacctcagctggtccagcatgctgggcaccgtgctgctgctggccctgctcccagggatcaccaccttacccagcgggccacctggtatgtatgggcagggaggtgacgggtctgtcatgcttctatccctgtttcaccctctttattttttttgagatggagtcttgctctgccacgcaggctggagtgcagtggcgcaatctccactcaccgcaacctccgcctccccggttcaagtgattctcctgcctcagcctcctgagtagctgggactacaggcacgcaccaccacgcctggctaattgttgtatttttagtagagacagcgtttccccatgttggccaggctggtctcgaactcctgacctcaggcgatccgcccgcctcgaacttttcaaagtgctgggattacaggtgtgagccaccgcgccccaccgatgtcactctctttcaactagacctttggtggtggtcctcatgggggtggggacagggcaggggagtggggtggggtctctgtcccccatcccaagggtggctcacatccccacttcggcaaagctccctgcagccacggagagggccagagttgtgggagggggccagtctacccaggtgctcttcagaagtgggtgtggtgtgcggatggacaagggggctcatgcctgtaatcccagcacttaagagaggctgaggtgagaggatcgcttgaagccaggagttccagaccagcctgggcaacatagaccccgtatggccgtggtagcgagtggctgtggtcatagctactcgagaggctgaagcaggaggatggctggagcccaggaggtggaggctgcagtgagctgtattcgcaccactgcactccagcctgggcgacagagggagaccctgtctcagaaaacaagaaaaatggatgtgcaggcaatctttcgtatttggagattagccgttttaccaggaccccgctcagcacctgaaggcagacatcagcgtgtgtttaggggcacgaagaggggaggggtcccatggctgcctcagcctggacaagtggaagcgtctcagatcttggtggcctggctgggctttggctgtgcccaggagagcctcttgggagggtatcctcttcacttcccttcctcgttggtgacagcacctatctccccttagaaaggggagccgcctgtcctgctgcgtccccaagagcagccctggggaaggtgggggagctctgacttcacccagccggaccccaccatcgggtgctcctcaccgcttctcttccgccccagggagggcttcgccagcttcggaggcttctctaggggcgcatggctctgcaaccggctcagttgctgggctgtgcgagtcccaggggtcgccagggggcacatcaccgtcaggggggaaagtggcgcggagcccatcatgggtgaatcggccgccgcaaccgcatcccttttccaaaggcggcggcgggggcgaggtggtcgggtcacttttcccggaggcctaaagggcagcgcgcgttttctctcctttgggccgcccttccccgccccgccagctcccccgttccccgcggcgcccggcccctggctgcgcagacccctcttcagcctgaagctgtccgacacagaggacgtctttcctcgccgcgcggggccgctcgaggtcccggccgacagccgcgtgttcgtgcaggtggggaccccggggacaccaggggcggatgggggccggtggggacgggcgatccctgatggcgcctccgtcccccaggcggccttggcccgtccctccccgcgctggggcctggccctgcaccgctgctcagtgacgccgtcctcacgcccggccccggggcccgccctggctctgctgcgtgagggctgccccgccgacacctctgtcgccttcccgccaccgccgccgccgagcccgggtgccgcccgccccgcgcgtttcagcttccgcctgcgcccggtcttcaacgcctcggtgcagttcctgcactgccagctgagccgctgccgccgcctccggggagtccgccgggcgcctgcgcctctgacgccgccgccgccgccgccgccatcgcgggtgcgcgggcgcagagcctggaatccgggcgctggggcccttcgggggctgggcacgggcgactctggcagtggaaagaggatactctcggggtctgaggatctgggggttgggggaggtggggcgcaagggtccatctctgccgacagagtttctccggggacagtgtggacactgggttcccccatggacagctctggaatccttcagggctgggggttggatgcagaaggccactaaggggacacatttctgggaacctggtgctgggcctcacatgctaggtgctgggagacgcggaccatgcgatcttgtggggctgggatttggggtccttaggggctgggcggctagccacttgtatgcgtaggggctgggctcagggcaccctaaggggccggatttccaggggtcccatcttggctgtggtggagagctggactcaggtctctcttgggggccctggggaccagagccacgatcccggtgccctgatgtccccgtctcttccccaccttcctctcccccagtgtctgcctcaggacgaggcgtgcgccgacactggcagtggcagcgccgagggcctggctgctgacggcccccacctgcacacgctgacgcagcctatcgtggtcaccgtgccgcggccgccccccagtgagcacgcagtcctcctccgcatggggccgtggggcggcagagcgggtgggaaggacgcctgggagctggacccagtctcagcgtggcacttcccacagggccgcccaagagtgtccccggccgtgcagtgcgccctgagcctcccgcgccggcccccgcggccctggaacccgcgccggtggtggcgctggtgttggcagccttcgtgctgggcgccgcgctggccgccgggctgggtctcgtctgtgcgcactcaggtaccgacgacctccgccaagccgggcccccagtctaatcccgcgcgtcgggacccggggcggccgcgatcccgcctgcggggcctgatcaaccctagctaggcctgcctccgcgatgcccgcagcagcccccaggggccgcccttagcctggcgtggcgcgcagcagcccttctgcagctcgcctctcccttccagcgccccacgcccctggcccgcccgcgagagcctcgcccagcggtccccagcccaggaggtcccagtgaggaaggtaggtatggaggtggagggagctgggtgaggtaggagatctgacagtgacgcttcctagcgcttagttcgtgccaggcactgtggtttttttgtttgtttgtttgtttgtttgtttgttttttgagacggagtttcgctcttgttgcccaggcgggagtgcaatggcgcgatctcggctcaccgcaacctctgcctcccgggttcaagcgattctcctacctcagcctcctgagtagctgggattacaggcatgcgccaccacacccggctaattttgtatttttagtagagacggggtttctccatgttggtcaggctggtctcgcacacccgacctcaggtgatcctaccgcttcggtctcccaaagtgctgagattacaggcgtgagccactgcgcccagcctccaggcactgttgtaaatgttttacgcctatgaactaacttaatccccttaacctctaggcggacactattataatccccattttagagacgagaatgatgaggcattctctgaattaagtaacttgtcaaaagtcacaatactgggtggagcttggattcgaactcaggcagtgggtcacccgcggcaggcgcgggctttgggtcgagccaggggcattaggtgaggagaggcactaggcgaggagaactcagcattcggacccggctcccactctcaccccggcatgcagaccgatggaagaggctagtggtctgctgggaagggaggtggcccgcgtagcgtcccctccctcgctgagcctcagccacccctcccagggatggtgcgcccccaacatggtccggagatacacccagctaccaattcgggaccaggaccaacaggaccggacccgcctccctggacctcggacctgatgaggccacgacccctgcgcttctctcctccccctgtccctcccacctgtgctcaaaataaacctctggactgaccggctaagttctggtgcagtcagtgagcgcgcaacgtgcggggtgggggataggtggggaggcttggggagaaagctgggagcaggacttggggggtattcctgagaaatcgtgacttacaggggtggagcctggggacggggcccatatgcccatatacccgtgtgcactcccaggccatgggagactgtagggcgttttgtctcaaacagaaagcgacacccggccgggcgcggtggctcccgcctgtaatcccagcacattgggaggccgaggtgggtggatcacttgaggtcaggagttccagaccagcgtggccgacatggtgaaaccccgtccctactaaaaaaagtaacaaaaaaagaattagcagggcgtagtggcgcgtgcttataatcccagctgctggggaggctgaggcaggagaatcgcttgaacccaggaggcagaggttgcagtgagccgagatcgcgccattgcactgcagcctgggcaacaagagcaaaaatctgtctaaaaaaaaaaaaaaagcggcacccaaccccacaagcgtaagtttaaaataaaccttccccctccctcctctccttacccggacacctgcccatctgcctcctgcgatctttctcaagccaggccttctccgctctccattacccccgcccggaccctgccctagctccgcttcgaccttctgcctctgctccagttccctcctggtctggacttcgccctcctcttagattgtcagtctagtctagagctccttaaatccctcctgcccgagctccactctaccttacacagacaagagtgggactatcagccccagtctacagaggaggaaactgaggctcggcaaggctaaatcacttgcccaaagtccccaggcctgtctgaccccagagcccaggctcttgaccgactggatcttcggacttgacctttcggccagaacccacccctctgcgagaagcaaagcacacagtagtagcttcatgagttagtccagcaacagagggagggcatgggatccaaggtgtcgtctccacttcatgaatgagataaagtgcaggctgagggtctccttcgccccgccccagttccggtgccgatctccccttcacttccattggggcggttccccgggcctccaaacgcgaagccacgcccccacgcgcgtccgcctccgcgcggttctttctgacctcggcggcccccgtagctccgcccatcggagaagcgaccttacagcgcctgcctctttctgagcggcatgaagccacctcccaggcggcgagcggccccggcgcgctatctgggcgaggtgaccggtcccgcgacctggagcgctcgcgagaagcggcagctagtgcgactcctgcaggcgcggcagggccagccggagccggacgccaccgagctggcccgggagctgcggggccggagcgaggctgaggtgagatgcggttctcgggaccggagccaggctggaggcggggctggggtggggcggagagtgggcggggctgcggcaggagccagcggggcggggccaggaatgtaagcgagcgggggcgtggcgtggggctgagtggcggggcgttagtgggtgagcctgggcggggtgaggggcggggcgtggacgggaagagaagacctaggggcggggcgagcttgggagctagacgtgggcggggcataagtgaagcggaggggcggggcgatgccgggggcggggcgtgcgtgccgctgaggtttggagagtgggtgggtgagtttgaggggcaggacgagcctgggggcggggcgtgggcgggttaatagcaagacttaagggcggggccgttttgggagtaaggcgtgggaggggcgtgggcgggatgagggcaagctttaaaggcggggcgagcctcggggtaatgcgtgggtgaggcgagggctaaacgggcggaatgaactgggagtaagatgctgccgagtccgggcgaaaagcaacgcatgctgttggacaggatacgagcttgaagtgagagggaatagagaagaggggacgaagaagggagttgaacggggtagtagtcagcatagggttgggccctggctgcgtgaaggagccggaactggcctgggccttacaacttccttaggtagctggtcacgctctgggtggggtaggggccttggcagtcactgggactcctaacaccgggccagcaggagactaaggcgcagtagcggggcccagagcatacaagggattgggctttggcttctctgctgcagccctgagctcatagaagcctcattccgccgcctctttcctttctagatccgggtcttcctccagcagctcaagggccgcgtagcccgggaggccattcagaaagtgcatccgggtggccttcagggaccaaggcgccgggaggcacagcccccagcccccatagaggtgaggcagatgaacagggtgaggctgtccagggcaggtccctggtgggtaggtgggagttgcgggggataacctgattaggggatccccaggaggagcagggcttggggggccattgcaggctgatccctgggctgaccctgtacctctggcttcactcaggtctggacggatctggctgagaagataacagggccactggaagaagccctggcagtggctttctcgcaggtaccgccattcccccaggcaggtcagggtgtcccagaggacagggtcacatgggccaaatcatgtgaacctgggtcctgggcccttttgccagctctgtggactccgtcagtcactggacacctcgagcctcagtgtccctggctctgaggccatctcttgtctgaggagcatcttagggtggcagggaggatgggggaatgtgtagacggtgagaagacttcccagctcctcttcctccctgattgttctgcctgccaggtgctcaccatcgcggccacggaaccggtcaccctcctgcactccaagccccccaagcccacgcaggcccgtggaaagcctttgctcctgagcgcccctggaggacaggaagaccccgcccctgaaatacctagctctgcccctgctgcacctagctccgcacccaggactcctgaccctgcccctgagaaaccttctgagtcgtcggctggtccctccactgaagaagactttgctgtggactttgagaagatctacaagtacttgtcctctgtctcccgaagtggccgcagccccgagctctcagcagctggtgagaagggtgagggagggggcaggagcagagggatcaagggtccctggcagcaggcaggggtgtccccttacccctctcctccatccatcactagagtccgctgtggtcctcgacctgctcatgtcacttccagaggagctgccactcctgccctgcacagccctggttgagcatatgacggagacgtacctacgcctgacagccccccagcccattcccgctggagggagcctggggcctgcagcagaaggggatggggctggctccaaggcaccagaggagacccccccagccaccgagaaggccgagcacagcgaactgaaatcgccttggcaagcagctgggatctgtcccctgaacccgttcctggtgcccctggagcttctgggtcgggcagccacccctgccaggtgaggggcatggcgggcaggaggccacaccaggccccccgccctgcccctcggttctgctcggctggccctggctctttctgaggatcccgtcatgggggaaggtccttgagatgatgctcagctgtggggcgggcctctaagatgccccatactttgggggtctcagaaatggaacccccgttgtacaggggttgggtgggggttgcaggactccactcacaagcctcctgatgtcaaggacaggcggacagggctggcctcccccagtccccaagccccactgtgccttgttgtctgctggggggccatagctggcactgcccaccgtaaaggccctcgcacattttcccccttcctgtacacctcggggccagcatcctcaccttcttcaactgaccagtcgtggttactccctgctgccaggtccttccccttcccgggggtattctgtgaccatgaataaagttatcattctctttctctttcacctgtgacttaaagatggaagtgggggccctgaagtgtcagagcttgggggtcacagggctgggggtgtgtgccagggaggagagctgccacctgactggtgtgatgaggcctggggtgaggagccccttggtgactgtgaagctgacaagtgtggatggggagagccggcagggcaccttggggacaggcgtcagggatgggtttcagagtagggcaaaatcacatcgcacaggtggaggggagaaggcagcagagagtgggggtgacccggtggaaggagttgagccccaggctgggcggttagaggaagatagataggggtgggctgccccgagtggcaggaggctagtgggagtggagtgtcccctggggtggctttgggacctcaaggatccctagaaggcggggagggaggggtactggagtcagggctgaccccaaacccctgggggtgctgggaccccgcttgaggccccctccatcagcttcacctgccctgtgggtgtggaccgagggtcgggtcctagagagggaagcagatgtcctcccacggcaccgcgtcccacgcccagctagtaatccaagtcggtaaattctccgttctcggagcctgtgcattcacccagcctgccttttatagaaacgctcattcctccccccacacactgcacacggctcccctggggtgcacatctcttgggagggccttggagcacagccagcccactccgtccgtggtcaccgccccaccgcaccagacccacaaacgctgccaatggtggtgggcagggggaggaggcttaggctgcaggtacggtcggtcgtcggagcctccctccagggctggcagagggtgcgcctcccagttccccacagggctgagtctctctcaccacccccggcgcctccccagatcaacagaattgtgtgtggaggggaggcagctgggggttacacatcagcccccccccccaaagccggtgaaaggtgcttgtgatcttggtgtctttgcagccctgggaagctttaaaaacatgcaaaagccagacctgggttccacttccagccctaccagactctagccatgtgactgtgggcaagtcagtcactggagctgcctggccctcggtctcctggcctgtagaatagggatgctaacagggcctggctcattctcacgatcccgaagaggagacaggctataaacaggaggtgccaactcagcacgctacttggcatgcagtaagcgctcaataatagcttttattatcatgttcggctcagaggcagggaggagtggaacggcatgggagggctgcgggaggcacggcaggggggtcaggggcaagtggcaggagggcggatggggggcagcggtgggcaccggggcagggcgcgctgacctgtcctggggcccgggttgggggcagaaatgagcctgcccacgctgtcccgccacggcaggcgccacgcatcctcgacacagccgccatggcaggccttcgggctccgtctccgggacaggcggtgcagggcaaattggtatgcagcgtccgccccgtgggcccgggagagcctgccccgcagggaccagagcccaaggacgggctcaacactcagtcaaggtggggttgacgacggccagacaacaggggagggaggagggacaagggggtccccacttccagggacgcacaatagcagagccacttacacgctggggagggggcggtgcgggggtcctcctcccgcccgggattcagagtcgggggtgggggccagccgggcgggtgagatgcgcagagaggaagggacagggcggataaaggcacgaggtggggctccggccaggccaggaagggacatgggaggggtctcgagggggaggggctgggcttctcccaactccctccccctctcccccgggctgggggctccggggcgggatcctgagcgcagtcctggccccgcggcgccccccgccgggccggccctctgagaccccggcgcagggccggctagggggcgccgcgcccctcacaccaacgcgtagtcgaactgcccgcgctcgagcgcctccttgtggtcggtccaggacgaggcgggcatgcggctgtaggggtcgagcaggatgcgcacgcagcgcaccatcaacagcaccagcaccacgagcaggcagagcacgaaggcgaacaccgtgcgctgctccgcgtccaggcccgcgcccaccgggggccccgtcgacggcggcaggggctccggcgacagcgtccacgtcgcgctcatggctcacatcgccgcgcgccctgcggaggaggggacccgccccgggcgccggggatgaggctgcgccctccctcccgcgcctcctccgcttcgccccctcctgccgccgccgccgccgcctcccttaacgtgcccgaccccatcccccgcccgcgcctcggtccccgggctacgcccatgcccggcccgccggatcgccgccaccaccacgcggggacccaactctggccgtgcgcgcaggtgggggcgctgagagccgggaaacggagccgcgcccggcctgggccgcacacaacaggtgcgaaagcgcggccgcggcccgggcgcgcggcgtggggacggtccccgcggcccctgcccccgctccctttgttctcggcggcctgggaccccctcccccaccgcccccgccccggcgcgcccctcaccctggcttcgacccggacggggaccgaccgcccggcggccgcgctctctcagggacccgcgccggctgcgcgttcggcctctccccggcggcggcggcggcggcccgggctccggctcagcccaccccacccgcccctggagcggcggagaccgaggcaggcaagcagcgcgcgagccgggccgccgcggctgttcctatggcgacgggggcggggccgccgcggggggcggggctgcagggggcggaggctgcgcagggagcggcgcgcgagccagcgaccccgcccgggcctgcgggaggacggaaccccagccccgaggacccgcgagcacccacgacctcgccggggagtgggcagctgccactcccacctcccctggcacttcgggccccccagcctgccctgtgcctgcattctcctccgcgatagaccccactcgagactccctgtttgtggggggacctcagtggccctaaaacactcatatgggcactcaagctcccccggccctggggacctcaattctcagagagctcaggcaggtcactgggatgagtaagtccccctagttttgtctgtcactggcctcgtcttccaactcagggtccagccctgggcaaggcgtccacccactgcggctgcagttcctcactcgaccttgaccgcctcccacagcagccgcctgctcccacccccaccatcgcctcggccactcccgcgccagagaagacacttcagactccgtagctgctcttctgcaattcggtgttttattctttccaaatctcaggcttatgcacaagatggaagagcactgttaaaattaaaaaatggacctaaagtggcttggctgacgtggctagcgggccactgagccgcgggtcccgggtcccaccctgctgtggggggagtccctgggccctggggcctcttggcactgtgtgacctgtgtgcaccccaggtgaccaggcgccgggacccctgcagggcagagcaacagggcaggggttggccctgcgggggagtgtctccagctgccgcgcacccgcaacagcccgttgtcccctcccgggccagctggtcttgcagccgtcctggcagagctgggggcagagcccgcagtcttgttcccagaggtctggagttgccgcaggtggtgttgcggtgcctctgtgcctgatgacccaggccggggctacctggctccggcaccacactcagagaatctgctcggtgctggaggccgagatgtccaggagccgccaggccgcgtaggggttgagctcgtcctggtctcggcagagcgcccacacgtacagcatccgcagcaccttgtcctgcagggtggggtgggaagggcactgttgagagggttgaggtgacccaggcagctctgggggggggccaggctctgtggggcaggagccaccggcaacttccccaggggctgggagcagaggccagcacaattgcctagactcaggaaccactcagccttggtaaaaacagacaggtctgctggtctccgacctccctcaaccccaaactctggcccagaggtttctccacatccccacccagtcccagagcttcagggctctgagctggggtctctgccaggtggccacacacagatcttggggacaggcggtgtcatgtgcctgccccatcccactccctcactcaccgggtcaccctccaccacctcgcctttggggttcctgaccaccatcaccagctgtgcctggaaggtgatgatcagcaccggcccctgctccatcatcttgcccatggccagctgcagaggggccgagaggggggatgtgcctcagaggacagcccggctgctcccctggaggtgaaacccctgcgcctaggccctgctaggagaaggctccagcaccaggcccagcaccggtccctccccgtgggccttgcctctcaggccaggaccaggcctccctcgagaccctccccttggacaagcccaagacctcttggatcagcccatggcccccagcccctggcaaggccacctcctgggccttgtctgggccatagttcccacccccgatggtggcccgggcccccactgcgaggtgcttacgtcgacgttgtcaatgtctaggatgcgagaatggaactggagacccagtgccttggcctgctggatggggtgggccagctggctgtaagtctgcaatgagaggccgacacgcctgcgtgatgccacccagggtgggcaccacgccacacagagctgctgcccacacaccctggcgcccaggtgccctgccgccagccagcaatggcagaggccaagaacccaggtccaagtggggaggcaggtgccacccacttactggcccagatcacacgcttcccactcctgggaacaacactctatccagatgacccaatgaaaacaggattaatcagcaaagtgggtgattctcttggaacaaaatcccaaatctactcccagggctaagctggcggccccttggctgatctttaatacttccatattcgccgcactctgaatcttggcctgagatcaaacgcctcttctaggatctgtcctcagcctgaggctgcctctgtcactgaccagcccccagtg

SEQ ID NO: 57 - DNA, 11000 bp, Homo Sapiens
gaaaggcgagcgctggtcgaatcccacctgactccagtcactctccaggagtggcctggtgcagaccacaacacttgccacctatgcacctacgtatttttccttgaaaggagctgcagagcctttggaacttcacttctcagcgaggaaaacccttcagattctcactgcttcttggagggcgggggtagggctggtgaaaatatgagaaagccctttcggtgcatttcacttgtctccacgtgcaaatagttgcacggctctcccctcattaacttcattagaaggtatattagcaacaattaaggacgccacaggaaaatgggaaggccgccccgcagaccgcgcgccctgcacaatgactcggggagtgaatgggggagcacgcccggccttggtcctggctgctacaagatgagaacaattagcaaacccctttccaccacctaatttcgcgtggtaacaaaatggatttttccccatgaatgcctggccggcctattcattatctctcttctattagtaattttctgctccgtattcagcctcccaactcttcatttcctcccgtctcccagcgtacacagtgcctcttatgtcaggccgggcccgtttttatcttgtaatcataaaggccaccaaagcaattatcgccggtcttgactggaaaagctggtcattaattagcctccttttgccttcggtgcagcggattagctggtgccgggactgagttaatggaaacgcgggttaaatgagaaaagacgcccggattttcctgcctggatgcgcggctcggaggaggaccgcgaggttctccagcggcgggaggcggtggagccgccgcggagagggagggaggctttggagagggagggaaggaaagggggagggagagggaaaggggggagagggagaggaggcgcggggtgggggaggggagtgagcagggagccgggagagggaggaggggcgggaaccaggggagcggcccgaaccccgtttggtccggaccccgcagccaccgctgggtctcgccgccgggtcgcccttcgcgtggagatccggtccgcgccccctccccggtctcctcccctcccctcccctccgcccccctccctccggcccacacagcctcttccagaaagaagtcactctagagccgcgcgacccagccccagagtccgccggggtccgcccaccgggtctcctgcgcgcccctccccgcccctccccgggcacagcccgttcacgaaacctaaggcgccggccacgcgccacctcccccgggccggggtctcctcggtccccgcgcgggcgctggttctcccgggtgggcggcagccccgccctgtgccctcctgggccggcgcgagggaccctagagcgcgcggggggccccaggcggggaggagcggccgcgaccccggatgcgagaggcgtgtgggtccaagcggcgccgggacaggggccgggtcctctgcccaccccagggtccatgttcgcctgcggggccgcgtcccccggagccatacctgggcgggagggcttttcccgggggcccggcctgcgcccctcgccgcccctcgcccctcgcctctcgcctcccgcgggtcccgcctggccttggccgacggaacaagaacaacaaaggaagcggcgcgaccggcggagggggcgcccgccgccctcccacccctcatcccggccgggccgatggcccccgcgcgcctccatccgccccagcgcggaggcgaccccggccccgctgccccggcgtcgggaggacaccgcgcgctcacgtggatgactgcgcccgggaacagggacttcccgaaccttcctgccccgcgccgtgaggcccacacgcgcgcggtgaccaccctggttctgagggggcggcggggccacggcgtgtggcggacccggcagtggcacccaggctgtgcgcgcgggtgtgtggggttccgaggcgcagggcgaccgccggctccggctccccgaggaaggggcacaggcgctgcccgcggtcactcgggccaggtgagggcaggggacgcgcgggggccggaggaggaggcctggtctgcgggcggcaggagggacccggggccagccgaggctgttcccagggaggcagacacctgctgtcgccgggaccctcgacacgctccgcacgcgcgggagcggaaccgggcctgctttggaggcctcccttggcgcgcttggatttactcaaaggtcaaagaaaaatgtcaaggagagcgattgcctggagagctcctggctctcctcccgggtccccgctgggtcccaggagtccccggaggggaagcaaggagccccagtgccctggagtcctgtctccaccaacctcgcccggctccctgctgcctaggcccgcgctgtcccagcagaggaggggtgggagccgccccaggcccacctccccgcgccggtccacaaggaggcccctcctgcaacctgggagaggccgggggaggcccggagggcgaccgcgcggggccgcgggacctggacagccggggagtcgtgaccgcgggcagcgccggggctgagggcgaggagggtcttactgcagggaagggcgggacgctggacagagggaccgactggggtccaccggcctgacacagaagtcgctggatcccagggcccggctgggaaacccgcttcctacccgcccgcgggcgccgcagaagaaaccgaagaaagaggtcttccctccacgcccaggacggtttcaagtgtcccacccagcgctgagcaggagggtgatgcggagggaaaaactgttggctgcaagtcaggtcttaggaatcccggaagaaacgaagatttaaagaatttttttctaagtgattgagttccaataactttacaatgacttgactccctttttgtggagttaaaaaaaatcttcaaactcctgctagccatggcctttaagagaaagaaatgagtttaaaagtgagtttgaggcacagtcttgacccaggtgtggctttggtggtcctcagcgccatctcccccatgggcaccgaccccccaaggctgcaccacggcgggtggaccccaaagagagcccagactaattagaggcatcttatcagtcttgacttgaaattgaaagaaaattatgtttaaatatttatgactttgacatttacagtcaggcgtttttgaaaagcggaacacccccttctgtacagcggcagctcaatgactgaaagtttggaacagagaagaagtgaggaggaggaggagggagaaggaggcctggtaacacagcggcaggggtgcgtcccgggtgggggagatgcacagataggcacacttcagtgctgagttctcagaggcaggaatagtataatttaaaaaaataatcaggaatgattaagttaattttatcccaggttagatctatcttgagaataagatgaagtacaatatcgcatatttcttcctctcaaccgtctgcacctgcaactcctcaaatttagaatagacagtattgcaaaagttgtgattcaaaataagtgtatgaccacagagacaatttgtggagctgtcttagaacttagcatctgcagacactgtcctgaccaatttaaattattttgaccgtgcccctgagtggaggtgcatgaggcttccaccccatgcccttgtgagccatttacgggaaaatgccttcagaacttttttagctgtccatgtggtaagcttaaaagaaaagaaaaaaggacatgttatgcccaaactcaattgtgagagctgatacagccacacaaatacaaaactttatggtaaatatgtgttgacgggtagccagatttagtccttttccaaggttgtgtgatataaccagttaacaggagcagttcattctctgagtcacgatgtgcagtattaaaatatgcttgcatcataaagacgtagggatacaggtgctcggtgccagttaatgttaaacttctaacattgttgatgctttcatttgtatcatttctaaggaatcagatttcagtcccagcctcatcctatctttgtgtgcatttaaattactaaattataaatacctttttctcttaaaacttagaagtcagttttagagaccattaatgagttgctgtaacaagtttatctttggtttgctggatgaatcctcttagaattattaggaaatttcattctaaatttactaaaaggcattactaaaatataatactcactttagggctgatgaacattttaagttttcaggccatagcaagtgatccaacttgaaaacacgggggaaggggtgtcttaaaatattttaaaagtattttttaaagctgttaacggaactacttttaatttggaatttgccacagaattctaataaatgagagaagtcaggcggaaataatcatgtattaattctctgcattacaaaatcttttcagaagctattatcagagcaagaggcactgcggtctgaattcagggtgggagaagccctttgtgcaactgaaagctattgttcctccgtgcagatgaaattgtacttgcaaatctgccattcaagtggccaaaaaacccaaaaaagcaaaagaaaagaatcttcaaggaaaaattattcttaaatgtaaactttaatgaaaataagttgggatatactgttttaaaatgggctatttgttgagtttttccaggcatacacttaaaagtgaatatacaagaaaggcaataaattgtctatttgccatctttaagcactcctaaaacatcagttttaaagaaatactgtgttttaagacatcagggaagatttatgatactgatgtccaaagggggaagcacccttgtgcaaactaattctaaccagcagattgcctccggtgggagagagggacccagaggctgagcaggggaaggatgcccctgagaaagccgcccccagcctctttcagactctccgctggcgttttcatgacacccaaactcagactcagcggatcacacttaaggcaccggctcctgacccctatttttggcccgcccgcctggtccccaggcctgcctggacgcacgcgcgccttccacaccaggtgcttctcgggacggggcctggcctccccaccccgcaagaaccagaccctcttcaggactgggggggttaccgcttcgcctcctctacccggactcagaagccccaacccaagacccgcctagcgtcgcttgtcagaacccctctgtggcacgactttgagcagagggcgagggaaaggagggtcagcgttcggccccgtcccctgcctgggctttctcccccgcttccccgtccctcccccctcgccggttcaccgcatccccacaggagtcataaagatcaggccccagcgccggacacaaaggccaagggttcccgggagccgcgggtattcagagccaggagaggggtcccggcgcggagggtgctgcggcccagcctcctggccacagagcgcgccggccgcgagggaggaccaaggtccccaaccacgcccgcgtccacccgtgaatcccggcgctcgcagcccccgggcggcgcagccgccaccgccgccgtcttctctggagcgcagaggggtgtgcttgggagggggcgggagggcactttcctctgtgtcggtgaaaggaagagcttccagctccctcctccgcacaaaccttcacttcctctcttgttcgatcgcgtcctaaaatctgggatcggcgacgcaaggacagcctggtttggcgaagacccctcggacaccctgcgctccggactccaggcgggtggctccacggtgccggccgggacgcgcagctcggggggcgggaccacgtccgggaccccggggccgctgtccgaggacggaggtcggtgacttgaaccgcgtcgtcctcagggctgtggcggggcccctctcccagccgtccagcccgcagcgcccagctcagcgcactgaggaccaaaaagggcgggagactctctccggccctaaaaggcaattgtgctgagattttaactctaacttgggggttcgcccgattccctggagcaacgcttctctaaaaccacggagcaggccagtgttcggaactgcacaggtagttacgaaggaaggaaatgaagtccctcgttccaacagcttcgggtccagtcacaagtttctctctggcgagcacgcggccgcctcacctggggtgggggaggcgctgagaaagcgcagttctctttgggggaggagagatggcctctcagaggcgtccccacctgcctctggaacgcctctccctgcaggccccctcggttccctgcaattcgccgcccgctgggatactcccatggctcggaggcgcgctcccggaccctggtgaggagggtgaagagcgccccaaaatgggctgagaggaaaatgcgcccacactggcgcctctccatcctggctgctcgccccttccctcctcctttcccacacgcctcccatctccgtgcctgcacccccccacccccagcaccctgcaatggtcggaactgcagggagtggggagcaacgcgaaaggccgagagaagagcgctggggagaagtcccggaggtcctagactccttggggcggtctctgcggggcgctgggccaggacagctgccaaccctccaaatctgtgcgctcagaaggagctgccctttgcccgctcctcctcacaggcccaccctagacccacttggggatgatcccaggcgcagctctcccctgccggcccaagcctttgacaggagtcctgcggcgaggcagagaccccctgaactgagctctccgacgccctagttgcccgttagagcccccatgcgcgccctccagccttcgaaagctctcttcctcgccccaccacctacgcgcctggtgatgctctcgtgggcccttcctgctccctccgcccccatcccagcctctctcgcctcttccagggcccacccaaccgcactacgagcgcccgcgccccgcccggcacccctggttacctgcagctgggccggcgcccagcgcccgcgcgggaggaggtgggggcgtgcgccgggccgagcggcctcggggcgcagcagctgcgggtagcggcagcgccatcatcacagccagctgcttccctgcgctggagccacagactagcggggtcatccgcttctgaccacaaacttctagggcggccggaggagacaaaggtgccgcgcgtcgctgctccagcagcagcggctgcgcggcggcacgggctcggagcccgcaggcgccggagctctgcgcggccgctcggcccagctccgcgtgctccgccccggcccggcccccgggctaggcacgctgggccggggcgcggcgcgggcgggctcagggcgggctccggacggtcccggtagggccgccggccgcgcgcgtagcaccaaccagcgcggccgccgcgccccgccttatatccggcccggcgcgcacccggccggcggcggcgcggctcgcggcccagccaccggttgctatagcgatgtccccccccccccccacatgttgctgacagcaattggctaaggggccgcggctctccaaacaccctctcccgcccgagactatgaatggacatcagctttgtcagtcattggtacaacgccgaagccagggccttcgccttttctttcttttcagtgtttctccctttcatcgttcatactgggcaagttcagggtagcaccgaggggagagagacctcggccagaaaagtcaaggcgcgcggctctgctgtgacctttgtcctgggaggggtgggtggggtgcgtcgccactcttggcaagagaaaattgcacggcatatcgttcttcccagttaccttttccagtgttgccgttcgggcctttttgctccctttccaaatggaagcaggccaatgattcagggcgagtagacgagagcccctctgctcactttaccagggtcctcccgagtgtttaggtcccgatgcgcgtagaaagtgtcttgcgagacgcggaactggtgagactttgccaccatttggtccaggccaatgtcggccgccagcccaaaacgccgaagggagacggcggtgaaaacccaggcgtgcgagctgcgtccttgcccttccccctacccaggtcaatggtctggcctagaccaccgctctgcgggcgaaaggagtggagcagaatcacaggccacgctcccagtcgttcgagcctgcccacataacccccggcccctggcgcagtcaggcccgcagcgggcgagaagagctagggtctcggggcgactaggaccactgagcacctcccccccgcgcctcccgcccatgctctctctccccaggccctggaccccgggccacagccacaggttggggcaccccggtgcgcggcgcccccgcggagctggcgagagccggagagctgaaacccaacatctgtgtgtacaatgcgctctccgaggcccacagctgcaggaacaaggagaagaaaggaagaggggggcgcagatcttgtcacacgcagatgacagtctgcggagggctctttagtttctccttttctggaaaccccagcggccccctcctaggcccccctctcccaccgcctggccattgttccctgcgcccgggacagctggagacggcggcccgcgccactcgacgcccctcccgccgcacacccggctgcccgcggcgcccgctcccggcccctccggggccaactcctccacaccccccacctccccaggccaggcccaggcggcgcttccacagtctcccctcccctcccttgcactctggcgctgcccctagacctgctcggtgcagagggccttgcctggcgcttttctctcacaaacctagttctgtaaaacctgggggcgagccccagggggcagggctcagaggcgggggttgtccacagatatgagtacggtgccgtccgctgcaggcccctgtctaaaagtggccgaaggaccccgtttcctctgactgcaggcccaggctgagttccgcatttatttttgtatttatagggcaaggccagagcgcttcataaagctccagggcaaagaagtggcctcgcatcgggccatggttcccgcaggcctgagcgggctgcaggaggcccggtgcggctcggcgggggcgcgagaggcgagaaactgcggcgtcactggcgtcctctgcccatgagtgaacccctccagtaggcggggacggggtacatcaccttggccctctcgtcccccctgcccagggcaaggcccgcaaaaacccccgcaccctggctcgggggcggcgcggcggcgggcaggtcagagagaagcggtactcgggttcccccagcgcccgggatgccctcccagggaccttctcgggcaaagagtcgagtggtagcggttcctgtccctccccgccaccctcctccggtgcctcggcgtccccagccaggctccagggcgaccccaggcccggccctgggcagagacagaggaggggaggggaggtggcgctggggggcggggggccggagacggcgggaggaggactcgggagccggggcgggaagaggggaagacagcggagagaagggacggggaggggagggggctcggaggaggggacctgctgccctcagcctggctggtaaccggcctctccatagcaacggccagcgcgcgcgtctgtgtgtgcgcgcgtgtctgatgtgtgtgtgcccgtggtgttcccgggactccccgcgggggctgggaggggatcgcagaaccctagggtggcgacagagcaaacccctccaggactggaggcccgacctccgcggtgctgggagcgccctagggtctggctgcgccgcgctggcgacggggtaggctcggggaacgcgcgcaggccccgggatcggccgctggggcattggggcatcctgccctcgctgccccgaccctcccgctgcggtcgcagggccttggggcaccggggagtgggcgggtcttcccagcgacccggagcacaggggcgggcgacggcgcccccaccatggccctgcccggcccgagcgcccggcgcacctgaggtctgggccggggagcagctggggaaccgcgcgtcgcctcggggagctcccggccaggccggctccgggcagaggccagaggggccctggcgcaccctccccgcccgcggcgacctcgcaccaccttccccgccagcccgcggctctcctcgccctggatcgccggagcctcatccaggctggggtctccagcaggcggccgggagctctccgaggtggccaggagtggccggtagccgtctccctcggccaggccgtgtccagcccctcagtctccacggcggcgcagaccgcacgcggccaccctgggcctcggacagggctagggggacgcagaccctgccgtctgggggtcctggggcggccacggggccggcgaccccagagcaaggcggagcctagtacaggccagagagctggttttgctttcttcacagacatgacctgacagtgaatacacaaataaatacaattcttttcgttagtcccttcttccgttgtctcagtgtttcacttccaacatcaaagcaccgcattcctgatttgatcttaatttaatgacctgtctttctagtgctttgaggaaagatgggtgggaggtggcaccaattcagttcaatttgggtcactttaaaaatcgtgagagggcctgaaaggttccatgcgggttcaccagcagaacagcacacttcctcgtccacgccttggtgcacctgcggcaatatattctgggtggcagacggttatttatgtctgagagcctccaactcactccccttcctcccaccacccctcctctaaggtgcggcctgacctcagtggggctgcagaactggcctcgccaaagctgaaggcggacc

SEQ ID NO: 58 - DNA, 1743 bp, Homo Sapiens
ctgcttcttaaatcccgccgtaactgtgaatgtttgcgatgccaccacatccccagtacaagagaactggagcatctctggctccttccataatcgaagggcttccagcgtagggcgtagggggagaggcccgaagccctggagacagcgcccgagggatggaggccgcgctcggctgcgctcaggtccgggtggctccgggagctgagaccccgcaggatgcagcgggggggggccagggcctgatcccctacccctgcgagccagggccgcctacgcccccactgcttcccacaggtaacgtccagccctctcctcccctatcccccgaaatatcccggttccgctccgctccgctcgccgcccgtgaccccgaccccgacccgtccgcgacggcgccctccccaggaggcagcggaggactagggccaggccgcccaccctggcggcggcggcggctcccggccaaggcggaccctggggaggacagcagctgggccgcggcctgtccctagggggagcgggcgcagggccgcgagtgggcagcgcctccgccccgcacgaacaaagcggccaggcgcgccgggccgaggcagcaccgcctctccgggagcgcggggggcggggaggatggcgggggtactcacctgagggccggcggagggcgcgggcgggacaggcccaggagacgggaccgcggcgggccggggctccgcgccgagggcgcacgggctacggggaaggggcgaccggcgcgacgtccgcggcggggcccgggagccccgcgccgcgggccgggggccggggcccgagctcgattctgcggccgcgaggtatgggaaccggtccgccgggccaggcagcggtgctaggcagcaggggcagcgacgccgccgcctttcccttctcctgcccccgtccctgctccgccgcgtcctcgtcctcgctgggtccccgccgccgccgcctcagcctcggcgctcctcgggtttcttctctccatcaaggccgggccgacccgcagggaccatcccggaaagtgaggggttgttgccgtttcccgcagctgttggtggccatctttaatcctcctcctcctcctgctttctccacctcccgctggctgtctgactgactgactggatcctcctctttcccctcctgctcctcctactgagccggccgcagaaattgcagccgctcagcttctaccccctcctgcctttccttcctctttccttacttccttcccttccctcggcttcccgctcttgcctcactctcagcggctgccttcgcccctgtctgcagacagcgccgctggatgctcccagctggacttcaaccccactcctctcagtccctctccccactgccttccagacgcgcctcttccccgccccgcgcccctctctcctctcccacccctgcccctctccgcggcgctcaccctcctcagtcccagtttctgaaaggactcagctgagaaaggacaactgggttccgctttccttaaccctacaccctttagctggatgctgtcagaggcgatggagaaacgcaaaggtgcgttaattttactctagccagagtataaaagaactgcccacgccagctattgtactacgcagcttcgaaactcctgcacgctctcctgtgtggctcccgtccgtgatgggactgtagttgaggagctcggtctcaaatggtgccttccgtcagtgaccttgagtcggttgccta

SEQ ID NO: 59 - DNA, 10196 bp, Homo Sapiens
aagtgcacgcttaccgaggaggcagtcacagtcacaaccacattgtcacagtcggcgcacacctgtaccgggtcacagtcacgatcacacattaaccacagccacacacacagatagaaacatgcagttactcgcaggtatccccacctgaactctgccgcacacagtcacacagcatatagtcgcacaccactacggggacaaacgcagtaacactcaaccaggcacaagctccccacagccgcacacacaatgccgcacgtggtcctgctccctctcacacacacaccagcagccacagtctccgaggccgtgctgcacacggtgtgagcgttggaaacacactcatcacaagggcagcctgtcacaatcgcgcgatcattcaccacacacctccacacagacgcaagcgcacgctttcaatctcacctccaccgccgcacaaagccgaggcttggcccccggccccgccctctcccgggtttctcacctcaggccttaccagctttcgaagcagcagaaccctccccggcactggggtagttgctggtaaagccctgagggtcccgccagcgcgtgagttggaagctgaattaccgcgagaagtacagtcttgccgaggagacctctgggaagcgtagtcagagacgtatcaaggccggacaagatggttcccgatcgtcagaattcctgtccgcgccttgcgtcagccccgccgaaaggatcgccccccctagtcaaaccgctcgcgccccagaggcctcatggagtcccgcctcaggctcgggccttggcccccaaagaaagccactccgacgtgtttgagatgggcttagttcccggacccgtcctactgcccccaggcgctggacagcctcagaaagaggacaagtctgcatggaaagataatcgcacaactgagccttctgggagatgtagttcggagctgggaaggcggttggaccctccgaaagtcatcttaattgctctcacagataagccggtgctgggctgccggcctgagtactgtgcgcccagagtgcgcaggcgcaaacatcctgggttgctgttttggcctctttgttcgggcgtgaattttgtttattgctccttagtgcagaggggttatgggaccagaggttgtgagactcagaagtggttggggacgcagaaggggtgtagaccaggaacctgcgacctgatggggggaggtcgaagggaaaggaatcgccaaacgtgggacaggtttggagaggcagaaagagaggagtctgaaattgcaaagggcaggtgttattctgacttctgtgtgctttgtgataaatgagtggggcaggaagtaagaggagtttcactttctccttctgcaattatttgtgtacttggactaagtgtatctcatggccagtatttgactgcttttgacctataaaggtattgtatacacagtcatgcatagtttaataataaggatatatgctctccccacggtctccctctccctctctttccacggtctccctctgatgccgagccaaagctggactgtactgctgccctctcggctcactgcaacctccctgcctgattctcctgcctcagcctgccgagtgcctgcgattgcaggcgcgcgccgccacgcctgactggttttcgtatttttttggtctccaccaaacacagggtttcgctgtgttggccgggctggtctccagctcctaaccgcgagtggtccgccagcctcggcctcccgaggtgccgggattgcagacggagtcttgttcactcagtgctcaatggtgcccaggctggagtgcagtggcgtgatctcggctcgctacaacctcctcccagccgcctgctttggccccccaaagagccgagattgcagcctctgccccgccgccaccccatctgggaagtgaggagcttctctgcctggccgcccatcgtctgggatgtgaggagcccctctgcctggctgcccagtctggaaagtgaggagcgtctctgccaggccgcccatcgtctgggatgtggggagcgcctctgccccgccgccccgtctgggatgtgaggaacgcctctgcctggccgcgaccccgtctgggaggtgaggagcgtctctgcccggccgccccgtctgagaagtgagaccctctgcctggcaaccgccccgtctgagaagtgaggagcccctccgcccggcagccgccccgtctgagaagtgaggagcccctccgtccggcagccaccccgtctgggaagtgaggagcgtctccgcccggcagccaccccatccgggagggaggtgggggtcacccccgccaggccagccgccccgtccgggagggaggtgggggggtcagccccccgcccggccagccgccccgttcgggagggaggtgggggggtcagtcccccgcccggccagccgccccgtccgggaggcgaggggcgcctctgcctggccacccctactgggaattgaggagcccctctgcccggccagccgccccgtccgggagggaggtgggggggggtcagccccccgcccggccagcctctccgtccgggaggtgaggggcgcctctgcccggccgcccctactgggaagtgaggagcccctctgcctggccacgaccccatctgggaggtgtacccaacagctcattgagaacgggccatgatgacaatggcggtgttgtggaatagaaaggcgggaaaggtggggaaaagattgagaaatcggatggttgccgtgtctgtgtagaaagacgtagatatgggagtcttttcattttgttctgtactaagaaaaattcttctgccttgggatcctgttgatctgtgaccttacccccaaccctgtgctctctgaaacatgtgctgtgtccactcagggttaaatggattaagggcggtgcaagatgtgctttgttaaacagatgcttgaaggcagcatgctcgttaagagtcatcaccactccctaatcttaagtacccagggacacaaacactgccgaaggccgcagggtcctctgcctaggaaaaccagagacctttgttcacttgtttatctgctgacattccctccactatcgtcctatgaccctgccaaatccccctctgcaagaaacacccaagaatgatcaattaaaaaaaaataaataaataaataataaggatatattctggccgggtgcggtggttcacgcctgaaatcccagcactttgggaggctgaggggtttgagaccagcctgggcaacatggtgtaaaccccgtctatactaaaaatgcaaaaattagccgggcatggtggtgcgcgcctgtagtcccagctactcgggaggctgaggcaggagaatcgcttgaacccaggaggcagaggttgcagtgagccaagattgcaccactgcactccagcctgggcgacagagtgagactcggtctcaaaaaaaaaaaggatacattctgagaaatgcattgttgggcaatttcatcattatggagtgtactgacacaaacctagatggtatagctgactgaacacttaggctacatggtataacctgttgctcctaaactacaaagctatacagtatgttactgtactgaatacagttggaacactgtagggaccagccctacaaggtctgtgggtttttctccctgtgtgcagagactagaggtggtagaaataaagacacaagacaaagagataaaagacacctgggcccgggtgagccactaccaccaagacacagagactgatagtggccccgaatgccaggctgcactgttatttattggatacaagacaaggggggcagggtaaggagtgtgagccatctccaatgataggtaaggtcacgtgggtcacgtgtccactggacagggggcccttccctgtttggcagctgaagcggagagagagagaagacagcttacgcattatttctgcatatcagagacttttagtactttcactaattttgttactgctatctagaaggcagggccaggtgtacaggatggaacatgaaagcggaccagtagtgtgaccactgaagcacagcatcacaggaagacggttagacctccagataactgcgggcgggcctgactcatgtcaggccctccacaagacatggtggagtagagtcttctctaaactcccccggggaaagggagactccctttgctggtctgctaagtagtgggtgcttttccttggcactgacgctactgctagaccacaatccgcttggtaacaggcgtcttcccagacgctaacgttccgctagaccaaggagccctctggtggccctgtccgggcataacagaggctcacacacttgtcttctggtcacttctcaccatgtcccttcagctcatacctctgtatggcctggtttttcctaggttatgattgtagagtgaagattattataatatttgaataaagagtaattactacaaactaatgattagtgatacttgtgtataatcatatctgtgatctgtatctagtgtaattcttgttattttatatattttattatactgaaacagcccatgccctcggtctcttgcctcggcacctgggtggcttgctgcccacagaacacaatggtaagtatttatgtatctaaacatatctaaacacacaaaaggtacagtaaaaaaaacagcatgaaaagtaaaaaatggtacacttgtatagggtacttaccaagaatggaggctgcaggactggaagttgctctggagagtcgatgagaggtgagtgaatgtgaaggctaggacattacagtacaacactctagactttataaacattgtacacttaagcaacactacatgtatttaaagtttttcttccataataaattaacccttgcttgctgtaacttttctactttataaatgttcaaatttttaaaagctttttgacttttctgtaatatcgcttagcttaaaacacaaatacattgcacagcccatgtgggatccgtatctcttggtaaggaaatgttgcaggtcagatgtcattcttatgtggccacatagaggtagaaagactgcatatatgatactgcctttcccaaccacgggctcgtattctaacataccgcaacaatgcccaatatttatggggtcatagaaaataggattcactatggttggagaatttccagagccaatttaagttcaggaatgctggcaatgagaatgatcagtaggaatcagtgtaatgatttacatagttgaaactatcaactgggccaggctggtggctcacgcctataatcccagcactttgtgaggctgaggtgggctgatcacctgaggtcaggagtttgagactagcctgggcaacatggtgaaaccccgtctctactaaaaatacaaaaattagctaggcatggtggcacacacctgtgataccagctactcgggaggccaaggcaggagaactgcttgaacttgggaggcagaggttgcagccagccaagatcatgccactgcattcaagcttgggtgacagagcaaagactccatctcaaaaaaaaagttaaaatagaataaaacatatagccattatttttctgtttggggcaattttaaagtttttcttttgtcacaaaaacaggaatgtactatgcaaaggcttgaaataggccatcttttttttttttttttttgagttggagtttcgctcttgttgcccaggcaggctggagtgcaatggcatgatctcggctcaccacaacctccatctcctgggttcaagcaattctcctgcctcagcctcccaagtagctgggattacaggcatgcactaccacgcgtggctaattttgggtttctagtagagacgggatttctccatgttggtcaggctggtctcgaactcccgatctcaggtgatctgcctgcctcggtctgtcaaagtgctgggattacaggcatgagccactgtgcctggaaaataggccatctttttaaacaaaaaggcaatgattcacaaaagtctatgaatagaacatgtaactagttgatacaaatctaataggatttgtttaaaatcagtcaaatctaatacatctgaagtgttcttgtataaagtatcacatgaagaaaagaagaatttattaatgtcttaaaaaaatgggtttcttcatagacaatatgacaacttaccattaaaagtgtttcgggacggccgggtgcagtggcttacgcctgtaatcccagcactttgggaggccgaggcgggtggatcacgaggtcaggagatcgagaccatcctggctaacacagtgaaaccccatctctactaaaaatacaaaaaattagccgggcatggtggcgggtgcctgtagtcccagctactcgggaggctgaggcaggagaatggcgtgaacctgggaggcagggcctgcagtgagccgagatcgtgccactgcactccagcccgggcgacagagcaagactccatctcaaaaaaaaaaaaaaaaaaaaagtgtttcaggagacataaggaaatgcaacattattcttcctgaacacttttagttcaagactttccactcaataaaataggaaaggatctgaaactgagaaaatgtatttgagtacaaacagcttgtgaaacataatacttttttttgcatcatcagagggttttactgaacttataaccaacttgcccactcagtatgcaattcagatgtgagtgaggggccgggcgcagtggctcactcctgtaatcacagcactttggaaggcagaggcgggcgagtcacctgaggtcaggagttcgagaccagtctgaccaacatggtggaacctagtctctaccaaaaatacaaaaattagctgggcgtggtggtgtacacttgtaatcctaggtactccggaggctgaggcaggagaatcgcttgaacctgggaggcagagattgcagtgagtccagatctcgccattgcactccagcctgggtgacagagcaagactccatctcaaaacaaaacaaaacaaaaaaaacagatgtgagaggacagaggtgtctcacaggagcctgtactgtcttcaatcctatgtgtgcaggtatctaccacaggcaaacagtttctccacattttgtagttatatgatcttgctactagcaaaaagaggtaaacagcccctgtagaatgaagggactacagtcacgggactagagtcacagaatgaagctttcctcttaatattttttaatttgatgtttgaactctttttcttttttccttgagacagtcttgctctttcgcccaggctagagtgcagtggcacgatcttggcttactgccacctcctgtgttcaaacaattctcctgcctcagcctccggagtagctgggattacaggcgctcgccaccacacccagctaatttttgtatttttagtagagacggggtttcaccatgttggccaggctggtctcaaactccttacctcaggtgatccacccgcctcgggctcccaagtgctgggattacaggcatgagccactgcgcatggcccgatgtttgaactctcaatgcagcatcctagagaagggtgttcgggacctcctgtgcccaagggaccgataaagaaaaaagctccatttattatttgggatttgatgcacagatgaaaaacttaacacacaataacggaagtcggttgttagtaaatcacatcctagtctttcagcacttccataagagacgacatcttcagttgtctagttcttgtagttttagcacggcaacatcaatgatgcctatgtccagaatcagttaaaaagaccataatttgtttctcttagttcatctatttttcactggctcatggtcccaagtgtatctgaatgattacctttgggcattctctgctattgcttattagggtgctgtcgattgtccccatgttttgtgggctggttgggaaggggagcttgggaaggatgtgtcactctcaggaggttgtaagtcattgggacgcctccagggatgattccttccatggctgcaggaagtcctcctggagccacgcccacgatgcctggcggatatctgtatgttgcaccgttgagctcgggatgaattgcttgctggtctattgctgaccaaggcgctgatgtgacaaataactccttgttcacacagtttcttaagctttctgggacgcgacctgtgatgactcggcggatctcggtggcagctgcctccttcatctccagtgacgcctgcatgctgtcctaggcagtgtgaggagtgaagatgagatttggcgcatctttcaacggagtctgagcaaagctaaagggctccgattcgtgcaagccaagggctgcccctcctatcctgtcctccttgaggacctgtgctaaggctttctcatccaccaggccaccatgggctgcgttcacaaggaatgctccctgtctcatctgctttatagtaaagtcattgacgaggtggtggttatgttcattgagattgcagtgcaacgagacacagtcactctgatacagcaaaccctgcagggtgtatcagggtcccctctgcatgccctgggacctctctatcttgtcctacaagtaggggtcataaaatacgacgctgaatccaaaggccttggctcaaactgcaaccgcctgcctcatgcaaccgaagcccatgaggcctagcgtcttccacgaatgagggccactcccatggccacctcgagaatctgctccacgctctgaacccgcgcgccttcccacagtgtctggtacagccacatattcctccggcagagattgaggatgtggcagatagtggagttggctgcctcttccacggctgtggaggggatgttgcacatagtaatccggagctcactggcagccttgatgtccacgttgtcgtagccacttgcctatccacacgatcactctcagggccttgaacttctccaggtcctcccttgtttagaatcttctcgtggatctcctgcgtggactgtgcgtcacagaaggccacagtggccaggtccttcaggatgggcatctccacggtgcaggtcacagccatccagcggcgccagcagcgggagggggtgcagggggctgttcgtgatctgagggtggatagcttcacaagttctgtccaatcgctgtctcgtgattttgtgcttatccaccagggccattctttatggaactttgcaactctcagatcaaaaggcaaagcaggcctggcatggtgcctcatgcctgtaatcccagcacttgggaggctgaggcaggcagatcacttgaggtcaggagtttgagaccagcctggccaacatggggaaacaccatctttactaaaaatataaaaattagctgggcatggtggcgcgctcctgtaatcccagctactcgggaggctgaggcaggagaatcacttgaacccgggagtcagaggttgctgtgagctgagatcatgccactgcactccagcctgagtggcagagtgagactctgtctccaaaaaccaaaccaaaacaaacaacaacaacaaaacaaaaggcaaagcagtcctctaaaaacttacggaaactcgcaggagtgtgtgtgcatgacgccactatgaacccaatacatatctgtccacaaactctatagttcacaggatgggctgtccatcttttctttctttctttctttctttttgtcgccaggctggagtgcagtggcgcgatctcagctcactgcaatctccacctcccgggttcaaacgattgtcctgcctcagcctcctgagtagctgggattacaggtgcacaccaccacacctggctattttttgtattttagtagagacggggtttcaccatgttggacaggatggtctcgatcttctgaactcgtgatccacctgccttggcctcccaaagcgctgggattacaggtgtgagccactagctgtccatctttttaagggaatgcagcttcgtcagttcaaaaacatttaaggtgatgaaaccctcgtcctgggcagtcagcatccacagcggaaaggctcccgcccctcccaccccacctggaggctgtgctgcctcagttcagtgcagcatggctcctggttcagtccttcgctcctcgggccgctcccaagccaccttaaa

SEQ ID NO: 60 - DNA, 1231 bp, Homo Sapiens
ccacccaaccggtgacacagcccggggccccgccgccccctggcggccattacggatttccgcctccctcacagaaggcagtcactgcaacgtgcgtggcctcagttgcgtcatatccggcccttgcgatcagggcttgaggaacccgcgccatgaagtgcgtgtttgttaccgtagggaccaccagctttgacgacctcattgcgtgtgtgtcggcgcccgacagtctgcaagtgagtgagggaggcgagcaggcggcggcttggctcgccacccgccatctccggccatactgccagccgcgttagccttgcctgaccgtcgcgctcggaaagaaacccccgcaactctaccacaggtgccgctgccccttagctggcttctgcccacgcccggcggggcccttctccggctacccggccactcggggttgcctgtttcctcttcccattattccggccgctcctctccctcatttcttcagctccttttccggtctgcccccgcgctctattctccgcctccgcgtcctccgcccctccttccaacggctccgcccctccgagctcgggttttccaccgggctcggcagtttttcctcaggcccccctgtggaccgcacgtcggcgccggcgtctgagccagccgagctcgcctcagagcccggctccttcccctcagcacttggccggagcccgcgcggttcctctcctcagcgcgcgtcgtcccctcagggctcccggttctcgcagttgatcaagtgaggcagaacgggtagtgcctgggttccccccgagtttgcgactccttttccaaagtcttttcctgctgtggctttcgcgggactctgcgagctgggtcgcttagattcatgagtgcttgggaggttcctcgtcgggccccggaccagaaaatagttttgaaaactaagtgaaatcggccacagataggctttttggcggccgtgctccgatgttaacgtcaaactttagtagtggtggtggttcctgctctgttttacatagccagtttaaaaggccctcacattctgatttcctctttcagaaaatcgagagccttggttacaaccgacttatcctgcaaattggtagaggaacggtggtacctgaacccttcagtactgagtcgtttactctggatgtttacaggtacaaggattccttgaaagaagacattcagaaagcagatcttgttattagtcacgcaggta

SEQ ID NO: 61 - DNA, 16425 bp, Homo Sapiens
ggtctctgtgccttggcctctcctggtgcctcttcctcgtttgtctcctttcagcatcacgacccggtgccctccacccagcccagtgctgcctgccagagccccgggaaccctccaagttctgcaaaagccttccctggccaggttgcagccaatgcccgcagccagagggtgggtgggcagggctgatggtggttcctcagccgccaggcaagagacccccagccggagggtgggtgagcagggccgatggtgcttcctcagccgctgggtgagagactcccaggtgcccaggcctcctgggagggtgtggctggggccctctgggcctggcgcccggggagctggccagtggccatccactcctgagtcccccagacctgtgtctacccggcacacgtgctgtgtcccagggagagccgctgcgtcctggggctctggtgtcccggccttgacctggcttggtctcagccctgggcctggagcttccatctctctggtaccagttcctgcagcgctttgccccctggcactccccgagagatgcactttaaaaacaggatcgatttattgttggtgatgaggagagggcggcctgagcgtgagggggtgggcgtcagctgccggagaagcttctgccaggcaggagggacgagcgggcccccagctctgacctctcggcttctgttcatgtttgaaaatgaaatcggtggtttgggtggtcgtcagtttcctgtggccgacagaagaaagcaccacagctgggccttcaaacaatgagaattcacccactgagtcctgggagttagagctctgcagtcgaggggcccgtagggccacgctccctccaggcttcccagaggggctccttcctgcctctcccagctcctgttagacacaggtgtcccttggctgtggcctcagcgctccagtccctgcctccgtccccattcaggtgaccttccctgtgtctgcgcctcctgttctcccccttacaaggacacttgctgctgcgttcagacaatccaggatcctgaactcgattacatatgcagaaaccctgttcccaaataaggacatacaggttccggggtcgggagtggacacgtcttgctgggggccacgctcagcccctgcctgtaagtgctcctggattttcaggcgttcccaaggtgcaggatgtgagtctgcatttgtagacagagtccagaaaagtcagacaggccgaggggtggcgtccgtgaatcagaaagaggtctgagggtcgagcgtgggttcagcatgcgccccaccaccagccttgcaggggtagaggtctagggtggggccggctggcttgtggaaggtgtgagaagccgtcgtggcaaattcaactcttggccaggagtcggctcactgtggtctctgggccaaatcctgccggaacctgtttttgtaaataaagttttattggctcgcagccattcccacacgtgtcatctgtggctgctttccagctaagtatggtaaaggagactttaagctcaatcaagccaaaagggtgacgtcgggctctttacaggcaagctcctgaccccagtcctgactgtattattgggaatgtaacttgttgaacaaaggaggtgctggttgggggcaatggaaggaactggttgttatcaggtgccggagctgtctgccagggtgtggccaaggtgccaccaccacagagcagagccacaggggaggaaaggtccctgcctgacttctgggtgatcagcccaccaaggctccgaggaagctgaggccctcgaggtggaaggtggtggatggttggccagtgtgtgccccttgctgagcactgagggtgagccatgggtcacctggtccctctgtgcatgggcagccagattgcagggaagacgctctggccttatagctggtaacgcagacagatgtgtacctgaatatgcaagcatgtattgagtgcttactgcacacagggcctccacaccttcctgcagatggtccttacggcattgctgcaggtgggggtgccactgtccccaggtcacagatgaggaaactgaggccaagatcccaaggccatacagctgggaggtcagagcagggattcccaggggccttgccccttaggggaagggagtgaaggggtggtctgtatggtgcgtgattatcctcagtggaagtttcaacatgggtgtggctcagctttttagggtcccccaaggcagaggtggcccgggcccctgcagcgatctcacaacacacttcaactgcagacggtggagactgcgggctgtcctccggctcaagcggccctggggcccccgtcctgcgcggagccacccgtgttcatgctgttcccacacaccgtcatttcttgggtgctctggtgacgcatttgagggacattgctgttacggcgaattccgattacgccgctgtgtttgatttctctcttggggccgggcgtcctgcttcctgccttggagtttccagagggggccaggagattgtctggaaagcctcagctgggcaggcggagttctgtaggtgcgggaatgagggggcttctttctcaaattgggaatgcctagcttttttctagctgtaaacgtttcagacgctgcggacagatcctccaatgggaagtgaacgcactgtcgccgcgcccacaccacgccttgcttttgtgaatcaagcttcctggcatgcagctgcgcccaagggtctacacagggtctgaggctgctttcacgcagcaagggtggcggtgctgagtagtggccgcagagcctgtgtggccctgaaagctgcatgcttgccctctggccccttgcagaggaagcttgctgaccgctggcccctgtggtcacacagaccccctggctctgcgggctgtggccatgtggcccggggaggtgggcacggctggggagggaagctgagcaccatgtctgctctggactccattgcaaaaatgagtgtctgcgtcaaattcatttgggattttggttctcacgtggctttgcagggcctgtgtgaagagtgagcacctgcttttcagagcttcagatgacacgtcattctgcaatcctcttcggggacattctccccaatcccctcctgcatgctcacagggatttggggtgtttgtatgaggtcccaaaacctacaccctcgccgaagccgggtatcctggagcccagctgccggggcctaggtgggaggaggcctggtcatcaagcctggagccatgccgggagggccgggagtcttcctgcgccgtcctctctgctctctcaggcagacctgctgcccccgccattcacaggagtgtccccgggccaggtggtttgcccaaggccacacagggactgtgctgtgccaggtttgagctgcacctggtggagtagacagcaccagccggttgcctgtggtgacagtgacgttggaaaatgggaaggtgggggtggagacggggacccgagttgccctggagggtccgggaggcagaacgcaggcaggtccccagcagccgaggaagagactagggcctgctgtgctgggcagtggccgggtggatggggatgggacccaaggcccatcgacctcccctaccccctggggctgaagctcagccacaacctgggaactaaaggaaccaggaggggcggtgggtctcgaggcagcagggagtgggcacaggtgtggctggcagggcggcaggataggagcggactggcagaaccagggcaggaggccacagccaccgggcaggccccacgctgggcccccaagcccgtgaccacagatcctgcagccctcagtgtggcccagggggctccagggcctgggacagggcaaatccgccagtgaaggtccagaacccagtcatgggagccagcgtcgggggctgggcacagacatgaatattctgagttcatttccgctcttgcagcctgtgggtcttgcaaggggaggggatcgccccattttgtatgccgggagtcgaagccttggcatggctgagtggctggcttgaggtcatgaccccagcccgggtctctgcactgtcacggcctccccggggacgccaagggtgcgggcaggcggtgttggctggcgtccctgacggccacgctccttgcagactgcctgctgatgctggtctacaaggacaagtcggagcgtatcaagggcctgcgggagcgcagcagcctgacgctagaggacatctgcgggctggagcccggcctgccctacgagggcttggtccacacgctggccattgtctgcctgtcccaggccatcatgctgggctttgacagccacgaggccatgtgtgcgtgggatgcccggatccgctatgcgctcggcgagggtgagtgacgggggccggggccgggcgggggctccccgttcaggtgtgccggggcccctcaccaacgtgggctgcagaggtgggagcggctccagggaaccgtgcaggaagatgggacattcatgggtgccttagggtggactgagctccagcctgggggtgcccacgagggtttgggagggggagtctgctgggctatggtgtctttagagctccctagcctgaccgttagttacaactggagcctttaacccaagctggtggcctttggagggacgtggcttcccaaagccctgccctttgcttcctacactggacagtggagcccagagcctggctaggaaggagagccccaggctgggcggtcccaccccagcttccccccaaaacaggatgggagggagggagggaatagagggaggggagagggaggggaagggagtgctcccctgtggaactggccctggaagaggtggaacgtcagtcccagccctgcaggggcttcgaatgggtgcctgggggcctctgggggctgagctgccctggggctgtgagcagaggtgggtggtgatggggccctgggcactcagcggcagagcaagcataatcctgcatctcctaagaaaccaaaatcagtgccaaaaccccataatgagcaaaacagtagaatgtccactgagttgagtcctggtcctaccctggcacccacccaataatcccagcagccacagctgccctccctttaaaaacttgctattttaggctgggcacggtggctcatacctgtaattccagtacttcgggaggctgaggtgggtggatcacctgagcccaggagatagagaccagaccaccctgggcaacgtggcgaaacctcgtctctactaaaaatacaaaaatgatggccaggtgcagtggctcatgcctgtaaaccttgtgctttgggaggccaaggcgggcagatcacctgaggtcaggacttcgagaccagcctggccaacatagcgaagccccatctctactaaaaatggaaaaattagcctggtgtggtggtgggcacatgtaatcccagctactcaggaggctgagacaggagaatcgcttgaacctgggaggcagaggttgcaatgagctgagatcgcgccattgcactccagcctgggcaacagagtaggactccatctcaaaaaaaaaagagctgggaggtggaggttgcggtgacctgaggttgtgccactgccctctagcctgggcgacagagtgagaccctgtctcaaaaaaacaaacacaaaaaaacttgctattttgatcagcatggactctgcataactttactttttaaaatattgattaaaatatcctggcccttgatggctgagttctttggccttggaggtgagtgtcccgctcccccagtcttgtccccaaggcagcagcccctcctgctccattgagtggggagagagaagctgggggcttagtgggaggaggtgcggttggctctgcaggagggcgcaggggaaggagacattaggagggaagaactgcatctttccagaaagttctcccgttgggggttccctccagcctggctcagcggcatgggtctgcttccttcatccgctggcgcagggccatggcacagaggccgctgggcaccgcccaggcagcttcatcttgatagaacgtggcctgacaaggatgcgcctgaggccacagcttggagcaggtagaggaggcagagaagggggaggtgggatgggaacaggggtccctttggctctgggggttggagatggagcaggtggggcccctggtggggaggctgctgtctgcctggtgtgctgacctgggaagacaggggaggtggggacagcattcaggaccactgtcctctctgaggctttcaggggcaggggcctgggcagagccagtgcacaggaccatgggggtgctcagggtttgggtgaatggccacctggatggagagagggccggtggtgccctgaggttcccgtggccaggctggggcctcgatacagactccagactctccacacccgaactggaggctgggggatccctgagcctcggtttccccttctgtgatggagccacacagctgtggagagagagccttcctggagaggtgccgggggtgggagcccagccagggcactcagctgccctgtcctccctagcacctccgtggtgggaggggagggaggtggaggtccgaggtcaggcccctctgggacttccttgcccctgaacaaagatagttcctgggaggatggcaaggagagaagtgcagcccccaggccccctcgtggctgtgaggagtgccatttgctcatcctgccgtcgctgcctccccggctgacacctgggcggctgcccccacctgccccagcctggcccctgcccctgctgcctcctcccgagatgccctctcaccccacctgtccacagtggcccctgttgcctcctctcatgatgccctctcgccccgcctgaccgtgatgccctctcgccccgcccaccctcgatgccctctcacctcacccgcccatgatgccctctcgccccgcctgcccgtgatgccctctcaccccacccgcccgtgatgccctctcaccccacccgcccgtgatgtcctctcaccctgcccgcccgtgatgccctcttgccccgcctgcccgcagtgcataggttccatgtgacagtggctccaggcaccaagttggagagcggcccggctaccctgcacctctgcaatgatgtcctcgtcttggccagggacatccccccggctgtcacggggcagtggaagctgtctgacctccggcgctacggggccgtgccaagcggattcatctttgaaggcgggaccaggtgtgggtactgtaagtacggatgtgtggggtcactgggcagcagcagcaccccccacttcccctgagaactgctggcttcgggccggccgaccccacttgcaggctggcctgctggcatttccagaatgcgccggcaggtggacggagtctccccacgctcgatgtccaaggtcctctgcccgcaggaacctcagtgtggagtgtcgaggaggggcctcggctacctctgctcttcctcactggagggagagagttcagggatgcgaggaggggcctgaggccacagagcctcagagccgctcatatccagatttcatggaaaggaaaaaacaaagaacaaacgcatttagcagtggggagtgtgagctcccgcataagcaccgcagaaacatattcttggaccaagaattcctggtggacatgccagccaccccgcctgtgggccgcccagagctgccctaatgtccccagtgaggtggccaggccgtgggtggggatggcctgagtcctctgggcctgtgaaggcctgagagctgtcctcactcagccaggggagtgagggaaatcggagcaggaaggcacccagccctgcccagagagtctgaggtgcccgccggggctgtgcaggagcaggttgttccagcaaccccctccactttctcccatgttgggtgcagatgcgccaggttgccctgtggacctgcagtccccgcggagggtgtgacgcctcctctcttctctctggaggggcagctgctcattggccgggctgaaggcgggcagagggacctcctgtgggcctggtttggggctgagaggactgagggactgcacttggctcacactggtgggggctctggtggagcctggatgtgtctgggtggaggaaacgcaggcaaggacacgggccacactggccgcctgggacctcatcctgcaaaggccagctggggcacgggcgcaagcccatctgggtgccacgttctgccaccttctgcgctgggcgctgggagcaaacccagtaggtcttgtggcaggagccagccctgttggggcctttgaggagacgacatctgacccttgaaaggggaacagggcagtgaggctcaggctccacggactgggggcgtacacagccagctgcaggaggcacgtgcggcagagctggcccggagtctcggcccctggggctggcaggggccatagccagagtccaaagggccttggcccctctgggattggagagccagtatggatgggcagggccgctgcctatgccagctgtgagctggtgcggggggtggggtggggggtggttcccgggagagctaggacacctgtcggggtcccatctgcccccaggccctccctgcggcaggccagaggttcagtactggggcttcgggagccactggggagtgggttggcggtggctgggcacagtgggtgggcccagcgtccctgtcctttgtcgtgtgggaagccagagctgcaggctgtagttgtcctgacacaggcagcctgtcctgtctgttgtgtgctaggtttgggggtgcctggaggagggggacccataccttcctttctgtctgtggaattccttggcacgggcaggcagccggccggggtggcgccgcgtgctcaccctctaagccggggcacagcaggaggacccgtttccttggagacctgcttattttgtctgggccataatggaatggggacactggatgtttttcctctgaggccgtggaggttcacatccctgccgaggtgtgggtggccccttttccgctggtaaacaatcccacacctggggctgtgcttctccccagggcgaggctactgtgccgttttcctgggctgctcaaaagctgggggcactcttgtggggccgtctgtcttgctgctgcctctccggggcaagctgttagagcagccccacccgcaaacctgcaaaccaggctggccccacagaacctgaaaacctgcaaaccgggctggccccacagaacccacaaacctgcagactgggctggccccacagaacccgcaaacgggggctggccccacagaacccgcctttgcagctcagtgctgaatgttctcgtccccggtggtaccctggcctgagagaggaagggctctgggaattcggtcaccgacggctgcacaccccgtagggtaggtgggttctggaggccaggctggaaggcttggccgagccacccatccctgtccccagcaggccctgctgggctgtatcctcctggagacaggcgtggccaccaccctgggtggtttaggctgggtcttagactcggccaagcggtggtgttctcaacgcagcactgagtgcaggccgtctggctggagggacggggagtctgcggcacgtgtgggcagcctggggcctcctgcgggagggagccggcaactcgggtggtccaggggcagcggcatcagcttcctggggcttctgtagcagatgacccccaagagagggccaagtgtccagaacgggttccttctgcagcctggaggccagaaaccccaaatcaaggggtcctcagggttggctttttccaaaagctcttggggaggacccatgggaaggtccttcctgccccttccagccgctggtggccccggcggcctcggctcgtggctgtgccactccagtccctgcgcctgctggctcctgcgtgagcctcctcttcagtctcttgcagtctgtggacttagggcccacctggatgacccagggtgaccccatcccgagaccatcaattccatccgcagaggctcctgttcacaggccctggtatgtgaacacattttgtgggccaccatttggccgacaactggggccactgggacggagaaatatccagaatctgaatcccaataagtctgtgggtgtcgtcacattcagtctggaggtcacagctgggctggagtcgtgggaaggccctggaagttcttgggtgtaggaaatccacattccctccttccccagggacaggtcctagcctggcccccgatccccagaaccgcctcacttggccccgccacagccagctctgcagagagcagagagggtgaccctggcccaaggcgatggctgcgcctcactcatcctgagacactgggcgtggctgtgcatcacgggggccctggtgggggtcgggtggagacaggcctggctggtcttggtgcctggggggcagaggtctctctgtggacagctgcctgttcagaatgggacaggaggtggcttggtgacagcaacccccgggtccccagtgtggcccaattccccgtctctgttggtcacgggcctgtagtgtggactcctggagcttggcccgagcgcacttggcacatggcaggcgacggtctgtggacagctcaggtctgcaggctccagcctcacacacgggcaagtgactgggccccgccttcggggatggactgtgcgtggtggagagtgatgcagagagggccactcgccctgggacaggctcagcttgcagcacagacggtggtgggccccagagagggtgagcccacccagagcctaggaagggagggctttggaggcgcagggggacgtttgagctgggccttgagggtgaatggaagcttttggaggtgccccctttttccccccttacctgctctctccagctgggtccagtccaaggaccatatctgcctctttgcccagcctctgggggccgcccggagcatttgaaactcattttgacttttaaaaatgattaagaatgtggccaggcacagtggctcatgtctgtaatcccagcactttgggaggcggaggtgggaggatcacctgaggtcaggagttcgagatcagcctggtcaacatggtgaaaccccatctctactaaaaatacaaaaattaggcaggtgtggtagcaggtgcctgtaatcccagctactccagaggctgaggtgggaaaatcacttgaacctgggagttggaggttgcagtgagctgagatcccgccattgcagtccagccaaggcaacagagccaggctctgtctcaaaaaaagaagagtaaagaatgaaaacctgaactaggaggctcttgctacatgaacgcggcatctgcccagctctggagagccccctgccggccacctttggccactgcagcctgcgggggcagcctggacagagctggctggaaccctggcctctgtcaggcagcagggagcgccttcagcagtttctcattgccgggcgctgggcctagggatcagacggtccggcctcagaggctgcgtgagactgagtgaggcattttcagtcctcagagggtgcgaggggagccaggaggggcacagaccccaggctgggggcactgcggggaagctctctggaggggcgagcctcaggggacttctgcagggtgaataggagttagctcagctgtcagagggtaaggggtggaggggggtgaaaagggcacttcagacatctttgagcacgaatgggtgtcccgaagggctgtgtaggagccctgttgggggggataggaggcgtgagggtggaggaggaggaggagacagggctgggttgtagagagctggctaattggaccagtgtttgtttgcaccattgtctcggagcagcagggagccattgaaggtgcttgagcatggggagtgttttatatgctaatgttgaccccggggtgcagatgagcttggaggaagaggctggcaggggccagagaaggttctgattgaggtccagaagatggagggcgaggctgccccaggcagcagctgcctggttgggggatgggaaccctgtggattgcaggaatgttaacaaggtggtgatggacaaggggaggagggccggcccgggaagggggggccttctagagtggtgcccctggactggggctgcttcaggagggcagaggaggggtgggagccaacacccactgccaggctccaggccttcctccacccgagacccactaggtggggccactcccaagtgtacaagaagctgccaccttgggggatggagagggctgagggtcatgttatcaagacttctcagtcctgcccatgcctacctggcatgagccatccaggacaccctggtcaccccgatgtttgttctctgaggagctgggattatgagcacttaagattctgacatcaaggggcagccacgagggcactcaagaatattcagatggaaaccatcttagatctaattggctcattaaatgtctgcgtggaggagcattttctttctcaagccggtgagtcctggagttagtgcaacagctttttcactggagacgtgtttctcaggaagcaggtgcgtctgtaacgtgggtgaggtttgcctgccgctcagcaaccccagcctctgtccagagttggcgccgccctgagccccgcagctcctggccttctgcttgtgttctgctgactctgtcctgcttctctgcgtcttccatgctctttcctcttaccctcacgcctcctatcccccacaacagggctcctatacagccctttgggacacccgtttgtgctcaaagatgtctgacgtgcccttttcacccccctccaccgcttaccctctaacagctgagctaactcctatttaccctgccacacctagcggctggcggctgttccctggctggcaattctgtgggccagggatctggacggggctcagtgaggacagctcatctctgccccatgaggtgctgcctggggtccctcgggcagtggcatttggctatggtggggcccaaaggcccaggaaagcactgtgccggctgttggctgggttgcctcagtttccctccaggaacctcaccctccgataggacaccttgggcttctcaataggttccaagagagcagaagctgccaggcctctgacggtcttggggcagggctgggagagcatccctcatgccactttatgccagagccatcactggctggcttcgattccagggagggagtggaccagcctctggagaaggagcggcctctgagggcagggataggggaaacagagtggccggctttgctgcagtcacacctgtgtgatatagcaaaatggggcaggccctgttctcccccctttccccaaacacacaggcaaacaggaaacatgcgcaccctgtcttggggaaggggcaggggggcggtcagcagcctctcacctatgtctttccacccaaggccgagcactgggggtctcctggttatgggcgcttgggtggacactgagaccacagacggcttgtgctccctgccggcaaggtgctcagcctggcagccgggacggcagcaggtggggctgaaccccagaggaggcgtccgtgagagcaccacagaggggctgtcggggtcaggggactgaagggggccagaggccaagaaaagcatcatgaaaggtgtcgttatgtggcctgagtctggaaaggtctggggtgttctaggtggccaggggtgtggagggtgggggtggcagcctcctgagtggagatgtaggggtgtggagggtggggacggcagcctcctgagtggagatgtaggggtgtggagggtggggacggcagcctcctgagtggagatgtaggggtgtggagggtggggacggcagcctcctgagtggagatgtaggggtgtggagggtggggacggcagcctcctgagtggagatggcaggcagacctggtgtgcagagggagctttgagcattcccaagaccggggggggctgggtgggagcgggggtggagcatgaacccagggaggcccagcgagagcctagtcgtgcggtgtcctgggaggccatggcccaagaccttggcagaccagcattggagatgggcatcttcctccagggccactgatgtcagctctgctggcatggatgatgggggtggctggcgagggtgtcgcgtgggcacgtgggagcccgaggctggcggtgggctgtgctccaggccttgcccggttgaccgtgtcttcggggtgagtgacgctccgcagacgccgcatggaatgcggggccggctccactccttccgtaatgtggttttttatagtcgggggactcattgtcccgtggccactgccagctgtctgtaagctcaggattagagagcctggcctttcgtgagagctggggctgtgccggctgagcccttcacagggaggggtggaccacggggacagggagcgactgcctggcactgagtgagccagccagcagacagcatgacggccttctccttgcctgcccccagggcctggtgcaggctctcttctgcccaccctacccagcttgggggccccaccccatcacggccctcatgagcctctcggggcatcctcctggatggcatcgcagcgggcattggcctcccctccatgcccacctccaattctgatcaggagcacccctcacccacagtaggactggaagctctatcgggccagaaggtgcacagggggccaggggacttggacttgagtccacctcgtggctgtgtgatggtggacaggtggcgtgccttctctgggcctcagtgtcctttttgctaaagtaggaatggcgctgtcccatgacccggtttggggacactacgtggaaggaagcatccacagcacaaggtgccgctcgccctcgtgtgcccggggtggctgccaaggggccggcagcgtcgccacgtgtcggggctggcctgagttccgtgtccctggaatctacagcctgtgttccgtgaaggcagagcatgactgggcagcaggcagcgggggttctaatgccgagatttcccttccccccaactcctgcccaccccggcgccttccctcctgcgtacctttctttgggcaatgggcagaggccccggagcgggcgggattcctgtgaggtgacgccagccggagtgtccagccgggtgcagccagcccagtggcccattcacgcggccgccagggcttcattcacccctggccgggagggcagcgcccccgtgactcgcagctggggcttctccacgggtggcggctgcatcgctctgccagtgacgctgggctggtccctgggggccctcctgctgctgtgggggtgcaggggtggatgctggccccaggatgctgcacacggcctcagggcagcacccacacactggcagctccagcttcccctgaaagatgaccgaggaggtggggaggacgcggtgctggccagcagtgacggctgcagcatgtgtgggcaggtgccgtgccacaccttttacaaacatctgaatgcagccctcccaacagcccgggggaaggaagtgtggtcacatggcagccttcctgggatgtgaccccagctccaggtggcacagctcccttctcctgtggccttggagccctgaggggaccctacttgatgtctctggggtctcctggctgcttcatttgccctcaagacggctgtgggggcagggtcgctgggaccttggggcagaggagggactgatcaagtgcctgctgggtggcagagcagccacatccccccatccccccaagcaagcccggaaggcaggtatgtgggcgggggcacccatctgtccagggcagggcaccccctccctcctccccatgccctgtcggctgcaggacctaggatgggcggggcagcactcaccccagcgcccaagtttgaagggtgcggcggggtccctggggagtccagaggctctggggacccagcttcacagagccaggtggggtgtcggctctgggcacccggattcacggggccaggcggggtgtcggctctgggcatctgacttcgtggggccaggcagggtgtcattgtcggctcttggtggagtttgctgcggtttcctgtgttcctcctcttcagggtccccagcccgccctcgggccagactgacctgtctctgtccttcctctgcaggggctggcgtcttcttcctgtcctcggccgagggggagcagatcagcttcctgttcgactgcatcgtccgaggcatctcccccaccaagggcccctttgggctgcggccggttctaccaggtgcgtgtgggagcct

SEQ ID NO: 62 - DNA, 2031 bp, Homo Sapiens
tcccatcggacgccactgcatatgcgttctgcctgcagttgatgatgcagccacagggcaagtgggtccagcgtttggacaagacaaacactggggttacagtggtggccagcagggtaagtagaaagctgaatgtctccaagggaaggctctgaaaccccacgacgttctggaccaccatgtgcatctgcaagggcaagagaacttcagacctaacctaaaattatactttgtacttctcaagccttttctccacgcacgctgcctcagttccctttccagttccttctcctgatggacagcggggacctctgctacggagctggctccctgtccttggtgatgggctcctgggaacggcggggcacacccccagggttgggaggggtttcagcttttgagtgccggatctgcgcccgctgcctattcaagactccaccagaaaggcacagtctacaacgtgggggacgctagctaggaaacaggcgtccgtgaaacccgcatctgattctccgaatggcctttgtcgcctccctggaccctcacctccgcccatgcgcgctcgtcacagtggggcgccactctgccacctcttaatcggcttcctcctggaaggaggaacaaaagcctgttttgttccctgtcttctccctccacaactgatctctcctcccctctatcccgccctgctggagatgggcgtcgtcctctctaggcgggaatggaacggcgagaaagggatgacagaaggttgtggggaaaaaaccttttaattccctctttccttttctgaatactctctgattttgctgtgtgagacaatatccttggccaccaccgatatggaaaactaagtcgctcgcgacggaaagcgatccccatgcccctgacttttgaaaggagaagcatttagtagtaaaggtttcgcagccaactagccctgtcccgaactgccttcttctaagtgcatgtctaaaacccagcgagatacacttggaagcggacttcactgtgtgtctcttggtgactccccaaaccggcgacgccggtcccaacactcatttacactgtctggcacacacactcgcgctttgtgagcaactgcacttttaccatcatgggcagccaaaggacgacttttgtaagcgctaggatcaaagcgaagcgcttctgcgctacgctcacggtgaagctcctggtgccatagagagtcccccggttctcacgcctgcaggcttcagccccagcggcagcgggcgcacccggtccgaacacggtgtcggagctcggagagcatcccccagagcgccgcagactcgggcctggagcatcctctggggacagggaaaccactctccccgcagtaggaggggtcccaggaattgaagctccacgggaaatttcctggtagttggagtggagtctcggcggctcctccgaacacagcaatcggtgagtgagtgggactgagaggcccacgaggagtccgaaggccaaagcgtacacgatagagaggaatagtacgtaggagctggagcagtccaccaggcagccccagggcgtgcgcacgaaggcgccccagccgcacagcgggagcgccgagagcagcagactggctgcccacacggtcagcaccacgccgagcacctggcccgatcttctggaggctgtctggctccccacacctctgtgcatcgtataaaagttgtaagagactaggagagtcgccttcaagttgctagagaggccctggcataaatacattaaggcagaggtggtgcacagaaattggaagtaaccggggacctcgtttggccactgcaaaaacatgaagatggtcaccgacaggacgctcatgagatcatccacagaccaggaagccacaagcatggacacaacagttctgttctgcattttcagcagggaaattagtgaataaatgctgcccaccaaggctgcaaaagtcatgagacatgtcaagcaaaaaagatagatattcagggttcctggcggatttaaaaggtccgtaga

SEQ ID NO: 63 - DNA, 2237 bp, Homo Sapiens
gtttgtgacagacgcctgtaggtatatggtaaggaaaacagattaaaacactaagaaatagtaagaggtcggaccgagggtttctcatctgtatgggaaatctcatctcgttcattactttcagaaacaaaaaggaaaacgactttaaagatacaggttaaaggccgaaggggtgtagaaccaccccccgcctccttccctccatccctcccaaatatcccagaacgagtcaaacctttcgaatctcgtagcacagataacaagcaactcagtaagactggacggggatgactgagggccaactcattacaggactacaggaaactccttagtcctaaacccgaatgcatccgtgaccatggtaacactccctacctgaccaaaagctatcaaacgctctgacaagtgtttacagctgctttctcgattactgaagtggctctgaaaagagcctttggggttaggtggttgatctattgcgtcccttgcacactcttacttcgagctggtgtacttggtgaccgccttggtgccctcggacacggcgtgcttggccagctcgccgggcagcagcaggcgcacggccgtctggatctcgcgggatgtgatggtggagcgcttgttgtagtgcgccaggcgggacgcctctcccgcgatgcgctcgaagatgtcgttgacgaaggagttcatgatgcccatggccttggacgagatgccggtgtcggggtggacctgcttcagcaccttgtacacgtaaacggagtagctctccttgcggctgcgcttgcgcttcttgccgtccttcttctgcactttcgtaacagcctttttggagcccttcttgggagcaggagcggatttcgctggatccggcatttttgcgcgaaaaaagagaaaagagacttaaagaagtaatccgaactaccgcaaaacgggctggttatgcgctacttatagagcccgtatgcaaatgaagactcgcaaagtgctgcgctttcattggttaacttacaacggtgtcgtcagagggggtggagtctatgtaaataatagattctagtcttgcttccttaatggtcactgtaacaaaagtcttgttatcctatcagaatggtccatttcacactaaccagttttaagctaggtgaagcgatagtttctacggcttggggttttttcttggttttcactttccattagacttgcatacggaagaaatcttaacgccagctagacaagttaactctcttgcctcgtttttgcatttttattctatactttgtggaaatttttttctcttccttgaaatactacctcacccatttttaaaaatcgccagatatttactcccgcccgcttaaattactattctggcttggacaccgcctgtagtatgcaatgaggaagatgctgagctttaattaagcttatagttcctaaataaaccaggaaacgggtttataatttttaagggactcgccccacccttacactcaggatcttccacatctagaaactccccatagtctcttgcccccatgcaaaactttacccacagaattgggagccggacctctagccttaaaccagcgtgaaaacgctcggccggaaccacaaggaccatgcctctgcggctttctctactgccggccaactcacggctgggctttgggttctgtaacgtcacccaccacgagtgcccctggcccctgaccgctgcgcaaggcagacgcacatcagatggagagccggtacagctgctcttgatgaaaacggcagtggctctgaaaagagcctttagatcgaccacttaaaaatatgccttaggcccgctccccgcggatgcggcgggccaactggatgtccttgggcatgatggtcacgcgcttggcatggatggcgcacaggttcgtgtcttcgaacagccccaccaggtaggcctcgctggcctcctgcagcgccatcacggccgagctctggaagcgcaggtccgtcttaaagtcctgcgcgatctcgcgtaccagccgctggaagggcagcttgcggatcagcagctccgtagacttctggtagcgccggatctcccgcagagccacggtgccgggccggtagcggtgcggcttcttcaccccgcccgtggccggcgcgctcttgcgggccgctttggtagccagctgcttcctcggggccttgccgccggtcgacttgcgggcagtctgcttagtacgggccatgct

SEQ ID NO: 64 - DNA, 4182 bp, Homo Sapiens
agactctctgaacgtttgatgaaatggactcttgtgaaaattaacagtgaatattcactgttgcactgtacgaagtctctgaaatgtaattaaaagtttttattgagcccccgagctttggcttgcgcgtatttttccggtcgcggacatcccaccgcgcagagcctcgcctccccgctgccctcagcctccgatgacttccccgcccccgccctgctcggtgacagacgttctactgcttccaatcggaggcacccttcgcgggagcggccaatcgggagctccggcaggcggggaggccgggccagttagatttggaggttcaacttcaacatggccgaagcaagtagcgccaatctaggcagcggctgtgaggaaaaaaggcatgaggggtcgtcttcggaatctgtgccacccggcactaccatttcgagggtgaagctcctcgacaccatggtggacacttttcttcagaagctggtcgccgccggcaggtaaagtggacgcagccgcggtgggagtgtttgttggcaccgaagctcaaatcccgcgaggtcaggacggccgcaggctggcgcgcggtgacgtgggtccgcgttgggggcggggcagtcggacgaggcgacccagtcaaatcctgagccttaggagtcagggtattcacgcactgataacctgtagcggaccgggatagctagctactccttcctacaggaagccccgttttcactaaaatttcaggtggttgggaggaaagatagagcctttgcaaattagagcagggttttttatttttttattatctttgagatagggccttgcgttgtcgcccaggctggagtgcagtggcgtgatcactgcagactcgacctcctgggctcaagcgatcttcctgccgcagcttcccaagtagccgggactacaggctcgtgctcccgcgcccggctacagatcagggtttaagtcgcggcccaccactatgtgagcaagacgtaagccccctctccctcgtcggcttcttgtcagtcaagtgacagcaatagtacctttctcatagggtcgttttgagaattaaatgagtaaatacacctaaggcgcctaggacaggacctgacacatagaaagatttgttagctattatgagaatatcttcttcactgggagattgccaggactaaatgtgttaccatgaaaagaaacatttttcctgtctcgacttttattttatttatttttatttttattttttgagacggagtctcgtcctgtcgcccaggctggagcagtggcgcgatcttggctcattgcaacctccgtctcccgggttcaaaggattcccctgcctcagcctcccaagtagctgggattacaggtgcacactaccacacccggctaattttttgtatctgtactagtagagacgaggtttcaccatgttggccaggctggtctggaactcctgacctcgtgatccacccacctcggcctcccaaagtaccaggattacaggcgtgagccaccgcgcccggccttcacttttatataatttatatgactcgagagttttgcccatgatcccaccaccccagcacatcagtgttgaaacgcttccaggagttcggtgccctgaccacagcctctccttctctagccctctctatccccacttccctgttctttggcttcatcaggactctcatctgttcccagtccattcctcctgggttcagcactttacctttcctacgcataattaatgatttgtcttcactcatgactcatcaaatatttgagtgtcagctggggataccatgaggcagacaaggcctcttgtctttttggagcttgcattcaatgcgtagagacgccaacaacatcatcacataggctggtaagatagtaaggccattattatgtgtcaacagtgactcatgcctgtaatccccgtgctttgggaggctgaggcaggaggatcatttgagcctggaagtttgaggcttcggtgagttataacagccccattgcactccagcctaggtgacagagcaagaccctgcctctaaaaaagaaaaaaaaaaaagataatgaacaggtaatgataccactagataggatgcttggggcgcccattctgagatggcatttcagctggaacttgaaggatgagaaggaaccagattattattattattattattattattttttttttttaggcagtgtctagctctgttgcccaggctggagtgcagtggctcgatctcggctcactgtagtctccacctgccgggttcaagtgattctcctccctcagcctcccgagtagttgagattacaggtgcctgctaccacggccagctaatttttgtattttttagtagagacagggtttcaccatgttggccaggctggtctcgaactgagctcaagcgatccactcacctctgcctcccaaagtgctgggattacaggcatgagccactgcacccaggcggaaccacctttttgaagaattacagaacgaatgtataggaaaaggggacagcctgtgcaaagtccctgaggtgatcagatattccaggaactggcagagaccttcttggctacagcatagtgatcagagtaaaatgagatgaggctggagaggcaggtaacagccttatcatgcagggcctagtttgccataataatgaatttgataaaataatttgtaatcacttttatgaaccaatcatggcacgtcatcatcatatgtcctggcacggtccctcccctgttgtatttatttttccctactcattcttgcccttgtctcccctcccatagtccccactttctcttagttatatgtccccccatttatttatttatttatttatttttatttcttttagagatgaggtcttgctgtgttgcccaagctgatctcaagctctgaggctcaagtgatcctcccacctcagcctcccagagtgctaggattacaggcatgagccacagtgcccgtcccatttatttatttatgagacagggtcttgctctgttgctcaggttggagtgtaatggcacaatctaggctcactgcaacccctgcctcttgggttcaagcgattctcctgtctcagcctcccgagtggctgggattacaggcatgcaccaccatgcccagctaattttcgtatttttagtagagatggggttttgccatgttggccaggctggtgttgaactcctgacctcaggtgatccgcctgcctcggccacttatttataacacaaatatttactgaccattgacagtgtcaataaatttgttctagttctagtagggttctagttgctggagataaggcagtgatcaagatggacaaggttccaatcttcttggagtagacattctggtaccattaaaaaaaaataaaattgagcctggcgcagtggctcacacctgtaatcccagcactttgagaggcagaggcgggtggatcacttgaggtcagaagttcgagaccagcctggccaatgtagcgaaaccccatctctactacaaatataaaaattagccgggcctagtggcgcatgcctgtaatcccagctactcgggaggctgaagcaggagaatcgcttgaacctgggaagcggaggtttcagtgagccaagatcccaccattgcattctagcctgggcaacagagtgagactctatctcaaaaaaataaataaaataaaataaaatcagtgtaaaggaatagagagcagctgacacgctgtcctctggcgacctgtcgctggagaggttgggactctggatgcgtgcggggctctggcctaccggtgacccggctagccggccgtgctcctgcttgagccgcctgctggggcccgcgggcctgctgatctctcgcgcgtccgagcgtcccgactcccggtgccggcccgggtccgggtctctgacccacccgggggcggcggggaaggcggcgagggctaccctgcccccgtgcgctctccgctgcgggcgcccggggcggccgcgacaaccccaccccactggctccgtgccgtgcgtgtcaggcgttctcgtctccgctgggttgtccgccgccccttccccggagtggggagttggccagggccgatcgactcgctggccggccggcccgcctccgctcccggggggctc

SEQ ID NO: 65 - DNA, 7572 bp, Artificial Sequence
  chemically treated genomic DNA (Homo sapiens)
tgtatgagtacggatgttacgagggtatttagcgagtgggaagggagtcgttttatatgtttttatatcgatttgtaaaattgttttgaaagggtatttttagatttatttgttttaaatgtagtaaaatttattcgatatcgtttataatgtatgtacgggttattttatatgtaatagttatcgtattaattaatttagttgatattgagatggtgaatggggcgggggagtagggaggaatatgtcgcgtatgaaaaatttcgggtgtaaaagttaatgtagaatttatttttcgaggaatcgaaaaagatatttacgatttttaagtggagagaggatagaaagttaagtggcgggggtcgcgattagtgatcgggattttagtttgattttagtatttagcggaataggattataatttaaagaaatgagtttttttcggagtaaagagcggtttcgattttaaagtagaaaaaataaattgtttgggggtggaagatggcgaggggcggggggcggggagggaggcgggtcgcggcgttggtttcggggttcgcggtacggttttttttgtcgcgttgtttagggttcggattttgttcggcgttgcgtttatcgcgagggtgttagattcgtcgcgtcgtcgtcgcgtttttttagtcgcggttttttttttcgtcgtttttttttgtttttttagtttttttttttacgtgtggatgacgttaaaatttcgcgaaaaagtcgcgtggtggtttttcgagcggaggcgcgatttcgtcgtttagcggttttttttcgggggcgtttggagggggagaagggcggaggcggtcggtttttttttttttcgggaggtaggatttttcgacgtcgatcgtcggacgtttttcgttttaaagtttattggaaaatttatttttgtaaagtaaatgtatttttagagttattttcggtcgcgtgaggcgtgttttaagttgaattagataggaagagggggaagttcgggttttttaatttttttttttttcgaagggaggggagtgagatgttaggtgggtgatagacggtaggcgttcgtttttttaatttacgtttgtcgtatttgtcgttttagtaatttagtttcgtttaagtcgaaattcgtcgaagggagtgcggatgtataggtttggcggattttgtttttttttagaacgtagcggtttagcgtttcggcgggcgcggttgcgattagagggtttcggaagcgagtgaatatttgtaatcgtattgttcgtttttatttattttgttttttcgtgtttttcgtttttcgacgttttttttttttttttgttcgtatttttttattttgtttgtattttttttttttttttgatgtgttttttatgtgttttttcggatttatgtgttttttcgtattttgttagtcgggttttcggttttgattgatcgtttatttttttacggagaaatataaatatagttttattttttgggggagtcgaggggaaggtagtggtttttatttttgagtttgaatttagttattattcgttttttatttggtttaggcgtttttgcgcggagaaggcgggattcgaattcgcgttgttttcgggttttgagtcgatcgcggaattatttggttgggaggtattttttaggtaagtttgggagtatgtgtgtttagtgttgtaggtttttgtagaaaagtgtttataaatatttaatattttgttgtattttttatttttaggttttgtatattttttaatcgaaattttaaaacgttagcgtagagggtggggagtcggtcggaaaaagaataaaagtttaataaaattggcgttcgttaaagtttattattagttttatatgggatatatatatatgtattttttttttcgtgaagggtgaaaaggagataaggaagaattaataatttattttttttcgtcgttttttattttcgcgttacggtgattagtttggattttaaagttagagtataggtttttgcgtttttttttgaaatcgaagtttatattgaaagaaagtgtgtatttttgtttagaaggtaatatgcgttttttcgcgtgttaggtggagtgtattttaataagatattagggttttaatatatggttggagtggcgattaaaagggaaaatttagtttttagtttaagttttttagagatatttttgttaattttcgtatttttttacgttttattttacgtgtgagagtttgtaaaattatcggggattggattcgatggcgagttttacgttcgggaatagttagtaatcggaaggggaagtggataggggaattttaagaggcgagtttgttacgcgggaagcgttcgaatttgcgggtttttatgaatgtagagggcgtcgggaagggggggtattcggtcgcgattttttttgttttttttattcgttgttttttttttcgttggaatttttttgtaaagtaagacggagtagggggagggggagagggaaggggcgagagggttttcggtttattttcgagacgtgaggattcgttatttaggtatttttttcggggtgggttgggtttcgggacgattattcgtttttttttcgttttcgttgtttttatttcgggagatttagagttttggatgttttttttcggagaagggggggtgtgcggagtcggggtggaagagattttgttcgtagagttatattaagtgatgtttagaggttgggagtttcggcggtttttgttttttgtttgtcgggttagatttatattttaaaaatatttttcgttttttttttttttttcgttttttttcgttgtaattttttttgattcgtttaaaggtggtttaggtgaaattggagtaatttttttatgggggttttaaaatgtaagtgaatgtttttattcggggtgatttaaaagtttaagtcgggaagtttaacgtgattaaaattaataggtgattgttcggggtcgattgtgtgcgggtgtatacggtattcggttcgggtgttattcgcggcgttggattgttttattttgagtttgtaatttgggttttttagcgagttttttttttttttgaaagttaatggtttttatagtaattagatatttttttcgttcgtttttttttttttttttttttatatataggagatgggatatttattttcgttgttattgataaggtcggaggcggtcgggtttttttttagttttcgttcgttttagcgttcgtttttttttcgtttttttttggtttttttttgatgtagtggggaacgcgttttattaaaaaaaaaaaaaaaaaaaaaaaaaaaaagtaatttgttcggtaataattagcgcgtagtagtaggagttttagagttattggttatgtaaatagagggaggggagacggcgttttaaatttttttttatttttttaaagcgatattttttttttttttttttattatttttttcgttttattttcgtttaaagaggttggtttcggggtttgagttaatcgtttgtatttttagtttattcgtttttttttttcgttttgtagggaatttagtgtacggtttatttagttcgcgttttatttcgttttgttggtttttcgcgtttttgttcgggttttttttttcggtgagggaggtatttagtcggtttcggtgtgtttagagagttcgagttacgttatgttcgttgtacgtgttagtttggttagtatattagggcgttggtttttttttttttttttggagtgaaatatattaaagggcgcggtgggggtggggggtgacgggaggaaggaggtgaagaaacgttattagatcgtattttttgtaaagatagttttgatttaagtatgcgttagagtacgtgttagggtcgatcgtgttggcggcgattttatcgtagtcggtttttagggagaaagtttggcgagtgaggcgcgaaatcggaggggtcggcgaggatgcgggcgaaggatcgagcgtggaggttttatgttttcggggaaaggaaggggtggtggtgtttgcgtagggggagcgagggggagtcggatttaattttttattcgttttttttttttttcgggttattttttagaaagttgtatcggtgtggttacgtttagcgtagatatttcgggcggtttgttagtagatgtaggggcgaggaagcgggttttttttgcgtggtcgttggtcgcgggggaatcgttgggagttttgttttcggtttgcggcggttttagacgttgtatcgcgtcgttttacggcgttcgaagagtttttagaaatacgatggtttttgttcgaggattatattttatttttttagagaagtatttttttttttttttaatatttattttttttttttttttttttttttgtatatattttgtaggggggggtagaagggacgttgttttggtttttttaatcggggttttcgaaatagtttcgaagttattaggaatatagattttagggatatgatttttatttttgggtatgcgaggttgttattttttaaaattatttttttttttattttttatttaagggatttatttttaaattgtttgaggttattttatttttagataatttattttatatttttggattttaaatataagggtaggaggattaggattcgttttgaagaagttaaagttggagggtcgtattttggcgtgttatatttatagaatgagtgaaattagagggtagaaataggagtcggtagttttttgtgggttgttttgttcggggtttttggtatgtagggttggatggagggagaggggtggggggtggcgggggatcgcgtttgaagttgggtcgggttagttgttgttttttttaataacgagaggggaaaaggagggagggagggagagattgaaaggaggaggggaggatcgggaggggaggaaaggggaggaggaattagagcggggagcgcggggagagggaggagagttaattgtttagttagtttgcgttatcgttttagagcggagaagagcgagtaggggagagcgagattagttttaaggggaggatcggtgcgagtgaggtagtttcgaggttttgttcgtttattatttaattttcgttttttttttgttttattttttttttttgtttttatttttttttcgaaaattttttatttagttaaaggaaggaggttaggggaacgtttttttttttttttttaaaaaataaaaatagaaaaatttttttttaggtcggggaaagtaggagggagaggggtcgtcgggttggttatggagttgttgtgttacgaggtggattcggttcgtagggtcgtgcgggatcgtaatttgtttcgagacgatcgcgttttgtagaatttgtttattatcgaggagcgttatttttcgtagtgtttttattttaagtgcgtgtagaaggatatttaattttatatgcgtagaatggtggttatttggatgttggaggtaggtcggggggtggcgttcgttaggagttaggattttttcggatgttcgggttttcggtcggagttttaaatttgggagagggtaattttcgcgtcggtttttcggtttttgtgcgggagtttatcgcgcgttttttggcgagacgcgtggttttatttttgtttttttttagataaattggggaggtagaggggggaggaaaatttgggagaagcgaggttgttttgggcgggggtaggggagtatttcgcgcgcgtgtttttgtatgtggttgttttttttttttatttttttcgcgatttgttttttgcgaagtcgtcgcggttgtttgcgttgcggttaggaagagagtcggggtttgaaatcgggatttcgagtagaaaggtaattttttttaaaaggttagagtaaattcgttttggttttaggttttcgtttgtggtcgcgatttcgcgttggtattttatcggggaggtggagggaggagggagaaggagagaaacggggaattcgggagtttcggaagttttattgaagaaacgcgtgttttaggggaatttaaaagaatcgttttttgttttttattttaagtttttgtttagcgagtcgtgtgtttacgtatgtatagttttggatttgtcgtggtttcgttatgttgttttgtaaattttttttggaaaggttgggaaacgtcgttcgtttattttcgtattttattatttcggttattttatttttaatcgtgtttttttttttattttttattttacgaagattatttatagtttggttttttagttttttcggtgcggagatttgggtggggtaggaagggggggagggggtgtgtgtaggggggatatcgggttatttttgaaggagaggtgggagtttttcgtgtttttttttagggttttttgttttcgttttttttttcgttcgttatcgcgttttttagtttttgtttttgtgggtcgtagtcggatattttcgtcgcggcgtttatttttttaagttttttttcgggatttaaagttttaggggtcggaatatagatttttttggtattcgaaatttttgtttcgggaagtttggtttttttttggggtttttacgttaaaagggtttttttaggatattttttcgatttttaattattttttgaaattatttttttttgtttcgattttagttgtcgaggttgcggcgtttttttttttttttttttttttttttttttttttatttttttttattcgtttttttaaaagcggtttttgggtcgtagggatttttttagatattttttttaattgtcgggaatgatagaggaggatttggggattcggatgagattaagaagtggattttcggagtttttagaatatttttattgattttttgaaaagatgacgaaatttaaaaaagagtgagtgagttagagtgcgcgaaggagtagttaaagggagcgtcgcggagttgtcgcggttgttgcgtattttttcgatttttcgttttggagttgtagtttatttttttttataggatttttgggaatattaaagtattgatgggttattttgatttattttagtttttttatttttgttttttatttttattacgtattttggtttttttttttttttataaaaaaaaattaattttttttgtttcgatagattacgtttttttatttttttttttttttgttgatgttatgttttttattttcgttttttaatttttttttatttttattataggtttgtgaggaatagaagtgcgaagaagaggttttttttttggttatgaattatttggatcgttttttggttggggtttcgatttcgaagttttatttgtaatttttgggtgttgtttgtatgtttttggtttttaaatttaaagagattagttcgttgatcgcggagaagttgtgtatttatatcgataattttattaagttttaggagttgttggtaatgatcggtttttttttttttttttttttgcgattttcgttttt

SEQ ID NO: 66 - DNA, 7572 bp, Artificial Sequence
  chemically treated genomic DNA (Homo sapiens)
gaaagcgggaatcgtagaaaggaagggaggaaggggtcggttattattagtagtttttgaggtttgatggagttgtcggtgtaaatgtatagttttttcgcggttagcgggttggtttttttgagtttggaggttaggaatatgtagatagtatttaggagttgtagatgggatttcggagtcgggattttagttaagaaacggtttaggtaatttatggttagagggaagatttttttttcgtatttttgttttttatagatttataatgggagtgggaaagggttggggggcgggggtggagagtatagtattagtaaaagagaaaaagaataaaaaagcgtaatttatcgaaataaaaaaaattaatttttttttgtgggagggggaggggattagaatgcgtgataagaataaagaataaagatgaggaaattggagtgaattagaatagtttattagtgttttggtatttttagggattttataaaagggggtgaattatagttttaaaacggggagtcggagaagtgcgtagtagtcgcggtagtttcgcgacgttttttttggttattttttcgcgtattttaatttatttatttttttttggatttcgttatttttttaaaaaattaataaaaatattttggaggtttcgggggtttattttttggttttattcggatttttagatttttttttattattttcgataattggaaaaaatgtttgggggggtttttgcggtttaggggtcgtttttgggggggcgggtgaggagaggtggggaagagagggggagggaggagaggaggaagagcgtcgtagtttcggtagttggagtcggagtagggggggatggttttaaaaaataattaaaaatcgaggaaatattttagaaaagtttttttggcgtgaaaattttaaagaagagttaggtttttcgaaatagaggtttcgggtgttagaaaggtttgtatttcgatttttggggttttggatttcgggaggaaatttgaaggggtgagcgtcgcggcgggagtgttcggttgcggtttataaggatagaaattagggaacgcggtgacgagcgaggggaaagacgggagtagagagttttggaaagaggtacggggggtttttattttttttttaggggtgattcggtattttttttatatatattttttttttttttttttattttatttaaattttcgtatcgaggaagttggaaaattaaattgtaagtaattttcgtgaggtggggggtgggggagagggtacgattagaagtggggtggtcgggataatggggtgcgagggtaagcgggcgacgttttttagtttttttaaagggagtttgtaaagtaatatggcgaaattacggtaggtttagagttgtgtatacgtgggtatacggttcgttgggtaaagatttggagtgaggggtaagaagcggtttttttgggtttttttgaaatacgcgtttttttaatgggattttcggggttttcgaatttttcgttttttttttttttttttttttttttattttttcggtgaagtgttagcgcggagtcgcgattataggcggggatttgaggttaagacgaatttgttttggttttttggggggggttgtttttttattcggggtttcgattttaggtttcgattttttttttggtcgtagcgtaagtagtcgcggcggtttcgtaaaagataggtcgcgaggggggtgggaagaagaggtagttatatgtaggaatacgcgcgcgggatgtttttttattttcgtttaggatagtttcgttttttttagattttttttttttttttgtttttttagtttatttggagaggaatagaaataaagttacgcgtttcgttagaaggcgcgcggtaaattttcgtataggagtcgggaggtcggcgcggggattgtttttttttaggtttagggtttcggtcggggattcgagtattcggaggggttttggtttttggcgagcgttatttttcgatttatttttagtatttaggtggttattattttgcgtatgtagggttggatgtttttttgtacgtatttgaagtaggagtattgcggaaggtagcgtttttcgatggtgagtaggttttgtaggacgcggtcgtttcggagtaggttgcggtttcgtacggttttgcggatcgggtttatttcgtggtatagtagttttatggttagttcggcggttttttttttttttgtttttttcggtttggaaaaaggtttttttgtttttgttttttggaaggggaggggagagcgtttttttgattttttttttttggttaaatagggggttttcgggggagaggtgagggtagagagagaaggtggagtagaagggaggcgaggattgggtggtgggcgagtagagtttcggggttgttttattcgtatcggttttttttttaaaattggtttcgtttttttttgttcgttttttttcgttttgaagcggtgacgtaagttggttgggtagttagttttttttttttttttcgcgtttttcgttttggtttttttttttttttttttttttttcggttttttttttttttttttaattttttttttttttttttttttttttttttcgttattaaggagaatagtagttggttcgatttaattttaaacgcggtttttcgttattttttatttttttttttttatttagttttgtatgttaggggtttcggatagggtaatttataaaaaattatcgatttttatttttgttttttaattttatttattttgtaggtgtagtacgttaaaatacgattttttaattttggtttttttaaaacggattttaatttttttgtttttgtatttaagatttaggaatgtagggtagattatttgaagatggggtgattttagataatttagaaataggttttttaagtgaaaaataagggagggggtgattttagaaaatagtaatttcgtatatttagagataaaggttatgtttttgaagtttgtgtttttgataatttcgaagttgtttcgaaagtttcgattaaagggattagaataacgttttttttgtttttttttgtagagtgtgtgtagaggaagaagagggagggagaggtgggtattaggaaggaaggggggtgtttttttggagggatagaatgtgattttcgagtagaaattatcgtgtttttgggggtttttcgggcgtcgtggggcgacgcggtgtagcgtttagggtcgtcgtaggtcgggggtagggtttttagcggttttttcgcggttagcggttacgtaggaaaaattcgttttttcgtttttgtatttgttgataagtcgttcgaggtgtttgcgttgagcgtggttatatcgatgtagttttttaggaaatggttcgggagggggagggggcgagtgagggattaggttcggttttttttcgttttttttgcgtaaatattattattttttttttttttcggaggtatgaggtttttacgttcggtttttcgttcgtattttcgtcgattttttcggtttcgcgttttattcgttaggttttttttttgggagtcgattgcggtgaagtcgtcgttagtacggtcggttttgatacgtgttttaacgtatgtttgagttaaggttgtttttataggagatacgatttggtggcgtttttttattttttttttttcgttattttttatttttatcgcgttttttggtgtattttattttaggaggaaggggagagattagcgttttgatgtgttggttaagttggtacgtgtagcgggtatggcgtggttcgagttttttgggtatatcgaggtcgattgagtgttttttttatcgagagagggggttcgggtaggggcgcggagagttagtaaggcggggtggggcgcgggttgggtgagtcgtatattaggttttttgtaaggcggaggaggggagcgaataaattagaggtgtaagcgattaatttaggtttcggagttagtttttttaaacgagggtggggcggaaggggtggtgggggggaaaggaggggatatcgttttaaaagggtgaggaagagtttggggcgtcgttttttttttttttatttgtatagttaatagttttggggtttttgttattgcgcgttgattgttatcgggtagattattttttttttttttttttttttttttttttagtaggacgcgttttttattatattaaaaggaagttaagggagggcggagggagagcgggcgttggggcgggcgaaagttggggagaggttcggtcgttttcgattttattaatagtagcgggaatgagtattttattttttatatgtaaagaaaggggagggaaggggcgggcgaggaaaatgtttaattgttgtggaagttattagtttttaggaagaaaaaaagttcgttgaaaaatttaagttgtaaatttaaaatgaaatagtttagcgtcgcggatgatattcgggtcgaatatcgtgtatattcgtatatagtcggtttcgaataattatttattggttttagttacgttgggtttttcgatttaagtttttgagttatttcggataaggatatttatttatattttaagatttttataagggaattattttaattttatttaagttatttttgagcggattaaagaaagttgtagcggggagaggcgagagaaggagggagggcgggaggtatttttaaagtataaatttaattcgataggtaagggatagaggtcgtcggggtttttagtttttggatattatttgatatagttttgcgagtaaggttttttttatttcgatttcgtatattttttttttttcggggaaaggtatttagagttttgggtttttcgaagtgggggtagcgggggcgaggaagaagcgggtggtcgtttcggggtttagtttatttcgaggagaatgtttgggtggcgagtttttacgtttcgggagtgagtcgagggttttttcgttttttttttttttttttttttttatttcgttttgttttatagagaaattttagcggggaggggggtagcgaatgggaggggtagagagggtcgcggtcggatgtttttttttttcggcgttttttgtatttatggagattcgtaagttcgggcgtttttcgcgtggtaggttcgttttttgaagtttttttgtttattttttttttcgattattgattgttttcgagcgtgaagttcgttatcgaatttaattttcggtggttttgtagatttttatacgtggggtggggcgtgagagggtgcggaggttggtaggaatgtttttaggaggtttggattggaaattgagtttttttttttggtcgttattttagttatgtgttaaaattttaatgttttgttaaaatgtattttatttagtacgcgggaaaacgtatgttgttttttaggtaaaagtgtatatttttttttagtgtagatttcggttttaagaaaaagcgtaagagtttgtgttttggttttgaagtttaaattgattatcgtggcgcgggggtggggggcggcgggagggggtagattgttggtttttttttattttttttttattttttacggaaaaaaaaatatatatatatatattttatgtaggattggtgataaattttagcgaacgttagttttattggatttttatttttttttcggtcggttttttattttttacgttagcgttttggagtttcggttggaaagtgtataaagtttggaggtggagggtgtagtagggtgttgggtgtttataggtatttttttgtaggagtttgtagtattaagtatatatatttttaagtttatttggaggatgttttttagttaggtgatttcgcggtcggtttaaggttcgggagtagcgcgagttcgagtttcgtttttttcgcgtaggggcgtttaggttaggtggggagcgggtagtgattgagtttaggtttagaaatgggagttattgtttttttttcggtttttttaaagagtggagttgtgtttgtgttttttcgtggagggatggacggttaattaaaatcgaaaattcgattggtaaaatgcgaggggatatataaattcgaggggatatataggaggtatattaagaggaaggagggagtgtaggtaaagtagaaaaatgcggataaggagaagaggaaaacgtcgggaagcggagagtacgggggagtagggtgggtggggacgggtagtgcgattgtaggtgtttattcgttttcgggattttttggtcgtagtcgcgttcgtcggggcgttgggtcgttgcgttttggaggggggtagagttcgttaggtttgtgtattcgtatttttttcggcgaatttcggtttggacggggttggattattgaggcggtagatgcgataggcgtgagttaagaaggcgagcgtttgtcgtttgttatttatttagtattttattttttttttttcggaaaaaaaaaaaattaaaagattcgaatttttttttttttttgtttgatttagtttaggatacgttttacgcggtcgaaaatagttttggaaatatatttgttttataaaagtgaattttttaataagttttggggcggggggcgttcggcggtcggcgtcggggggttttgtttttcgggaggagaaggaatcggtcgttttcgtttttttttttttttaggcgttttcgggagggggtcgttgggcggcggaatcgcgttttcgttcggggagttattacgcggttttttcgcggaattttgacgttatttatacgtgggggaaggggttgggagagtaagaggaagcggcgggggagggggtcgcggttgggagagcgcggcggcggcgcggcgggtttggtattttcgcggtgggcgtagcgtcgggtagggttcgggttttgggtagcgcggtagaggaggtcgtgtcgcggatttcggagttagcgtcgcgattcgttttttttttcgtttttcgtttttcgttattttttatttttaagtagtttattttttttattttgaaatcggggtcgttttttgtttcggaaaaagtttatttttttaggttatggttttgtttcgttgggtattgagattagattgaaatttcgattattggtcgcgattttcgttatttgattttttattttttttttatttgagagtcgtgaatgtttttttcggtttttcggggagtgagttttgtattgatttttatattcggagttttttatgcgcgatatatttttttttgttttttcgttttatttattattttagtattagttgggttggttaatacgatggttattatatgtaagataattcgtgtatgtattgtgagcgatatcggatgaattttgttgtatttggaataaatggatttagaaatatttttttaaaatagttttataaatcgatgtgaaaatatgtagggcgattttttttttattcgttggatattttcgtggtattcgtgtttatgta

SEQ ID NO: 67 - DNA, 3491 bp, Artificial Sequence
  chemically treated genomic DNA (Homo sapiens)
gttggtttcgaattttcgattttaggtgatttttttcgttttgattttttaaagtgaagggattataaggcgtgaggtatcgcgttcggtcgtttttgaataatttcgattaaaatttatattcgatatttattttaatatatattatagatttttattgataattttttttagtaagaaagataagttttatttaggtatttgtgaattggaggttaagtagttttagtatattttatatttttttaagattttttttttattttaaacgttcgtaaattttgtatttgataaagagtatatttttatttaatataaatatgtttttttttttagatttttttagtattcgagagatttgtacgcgcgtggttttttattttttttttttggttttttaagtttttagggcgtcgttaggaggaggtttgtgattataaattttttttgaaaattttttaggaagtttttttttttttcggagaatcgaagcgttatttgattttaatttttttgtaaatttcgttttttagagtcgttcgttattttttgttttcgttgtagattttttatttatttggatcggttttcgatcgtaattattcggtgcgttgggtagcgttttcgtttttagtagcgttcgtattttttttattcgatttcgggtcgcggtcgtggttagttagttagtcgaaggttttatgttgtttttcgtcgtcggttttatgttgtttttcgtcgttcgttgtttgtttttttttttttcgtagtcgtcgagcgtacgcggttcgttttattttttggtgattagttagtttttttttttttttttttcggtgttggcggaagagtttttttcgattttgttttttaaattttttggagggatcgcggtatttttttaggtaaggggacgtcgtgagcgagtgttcggaggaggtgttattaatttcgagtatttagcgaatgtggtatttttgaagtcgttttaggttgggtttttttcgggggtattagtcggaagtagttttcgttagagttagcgttggtaaggaaggaggattgggtttttttttatttgttttttatatcgtttttcggtttttttgtttttagtcgcgttttttcgtttgttagtaaaggcgtgtttgagtgcgtttattttgttaaaaagaaattcgttttcgtttcgtttttttttttcgcgatataatttttttaattgttaaattgaatcggggtgtttggtgttatagggaaagtatggtttttttttttaattataagaaaaagtaaaattatttttttttagttgtgagagttttatcgagaatcgaaattatttgtacgattagaaagtgtttttttatttttttaatttttgatttttaggagcgcggggtttattaagttagaaattttagtttaaaggattttttttggagagtcggattgtttttttttttttttttttttttttttttgcgtgtaaaacggttgtttggggtaagggttttttagacgtgtatattgtttggtataagagtagattttgaaaagatgaggtttatttaatacggacgggggagaattttgtttgtaggtagataggaaaatggggagggagttattggaaggacggattttatttttaaagttataatttttagattagaaaaagtgtttagtgttttagaagtagagttgtatagtgatttaaagattagttttaaatattgttttgttttttttatattttttatattttttttttttattgaaaatattttgtatttttcgtaattataaagggggaagggaatatgagtgttttttgttttataggggttgttgtgagtttaaatgatgtattaatatatataagttttaagaatagtgttatatattttaagttaatatttgttagtttttgaattattcgttttgaggattggtttgtaattttgttttgaggtatagaaagaaaatgttttggagtaggacgcggtggtttatatttgtaattttagtattttgggaagtcgaggcgggtagattatttgaggttaggagttcgaggttagtttggttaaaatggtgatatttcgtttttattaaaaatataaaaattagttggttatggtggcgtacgtgtgtaattttagttatttaggaggttgaggtaggagaatcgtttgaattcgggaggtagaggttgtagtaagtcgagatcgcgttattattttttagtttgggtgatagaatgagatttcgatttaaaaaaaaaaaaaaaaatgttttggatagaattattattattatataaaaggaaagttcggatgcggtggtttacgtttataattttagtattttgggaggtcgagataggcggattatttgaggttaggagttcgagataagtttgattaatatggcgaaattttgtttttattaaaaaatataaaattagcggggtttggtggcgtatgtttgtaattttagttattcggaggttgatgtaggagaatcgtttgaatttaggagaaggcggaggttgtagtgagtcgagatcgcgttattgtattttagtttgggagataagagcgaaatttggttttaagaaaaaaagaaagaaagaaagaaagaaagattaagaagaatttattttttgaaaagattatgggtattttttattatttttatttataaagaaaagttaaatagtattaaagagtataataagcgtaaggaggtaaaagttttaattttttttgtgattattattttttaagtttattaaaaatatgtattacgttttaaaaaatggattgtttagattttgttgatgttttaagtatatgtttaatttgtttattggataatttagttttgtttaaaagttatattttaatttttggttgatttaaattttgtagatttagtatattttgtatttttagtgtttgtttgattttaaaatatgtagtttttaaaatgaagttaatgaaaataatttgggatgttaagtatgttattaaaatttataatgtattattgtattatttatatttttttcggggtattttttaattagttgtgtagtaatgatagggaaaatttaaattatcgataaataaaattattttagtttagtttaagatattttatgatggaggaggaagaaagtggttgttaggatgggagggagggaatatatttttattattaatataatggttttttttttttgtttgtttgttttgtgtgtttttttgagatggagtttcgttttgttgtttaggttggagtgaaatggtatcgtacgatttttttcggtttattgtaattttcgtttttcgggttcgagtaatttttttgttttagtttttcgagtagttgggattataggtatatgttgttatatttagttaatttttgtattattagtagagacggggttttattatgttggttaggtttgtttcgaattt

SEQ ID NO: 68 - DNA, 3491 bp, Artificial Sequence
  chemically treated genomic DNA (Homo sapiens)
gagttcgagataagtttagttaatatagtgaaatttcgtttttattaataatataaaaattagttgggtatggtagtatgtgtttgtaattttagttattcgggaggttgaggtaggagaattgttcgaattcgggaggcggaggttgtagtgaatcgagagagatcgtgcggtgttattttattttagtttgggtaatagagcgaaattttattttaaaaaaatatataaaataaataaataaaaagaaagaattattgtattagtgatggaaatgtgtttttttttttttattttggtaattatttttttttttttttattataaaatattttaaattaaattaaaataattttatttatcgatagtttgaattttttttattattgttatatagttaattgagaggtatttcgaggaaaatataaatggtatagtaatgtattgtagattttaataatatatttgatattttaaattgtttttattggttttattttaaaaattatatgttttaaaattaagtagatattaaaagtataagatatattgggtttataaggtttaagttaattagggattgaaatataatttttaaatagagttggattatttagtaggtagattaagtatgtgtttaaggtattagtaaagtttgagtaatttattttttaaaacgtagtatatgtttttgataagtttaaaaagtagtagttataggaaaaattagaatttttatttttttgcgtttgttatattttttagtgttgtttaatttttttttgtaagtgagggtggtggagggtgtttataatttttttagggagtaagttttttttggttttttttttttttttttttttttttttttttgagattaagtttcgtttttgttttttaggttggagtgtaatggcgcgatttcggtttattgtaattttcgtttttttttgggtttaagcgatttttttatattagttttcgagtagttgggattataggtatgcgttattaagtttcgttaattttgtattttttagtagagatagggtttcgttatgttggttaggtttgtttcgaatttttggttttaggtgattcgtttgtttcggttttttagaatgttgggattatagacgtgagttatcgtattcggattttttttttatgtaatagtgataattttatttaaagtatttttttttttttttttgagtcggagttttattttgttatttaggttggagggtggtggcgcgatttcggtttattgtaatttttgtttttcgggtttaagcgatttttttgttttagttttttgagtagttggaattatatacgtgcgttattatggttagttaatttttgtatttttagtagagacggggtgttattattttggttaagttggtttcgaatttttgattttaggtgatttgttcgtttcggttttttaaagtgttgggattataggtgtgagttatcgcgttttgttttaaagtattttttttttatgttttaaaataagattgtaagttagtttttaaagcggataatttaagagttaataggtattagtttaggatgtgtggtattgtttttaaggtttatatgtattaatatattatttaaatttataataatttttataaagtagggggtatttatatttttttttttttttataattacgaaaaatgtaaggtatttttagtaggaaagagaaatgtgagaagtgtgaaggagataggatagtatttgaagttggtttttggattattgtgtaattttgtttttagaatattgagtattttttttggtttaggaattatgattttgagaatggagttcgtttttttaatgattttttttttatttttttatttgtttataggtagaattttttttcgttcgtattaaataaattttatttttttagagtttgtttttatattaggtaatgtatacgtttgagaaatttttgttttagatagtcgttttatacgtaggaggggaaggggaggggaaggagagagtagttcgattttttaaaaggaattttttgaattagggtttttgatttagtgaatttcgcgtttttgaaaattaagggttgagggggtagggggatattttttagtcgtataggtgatttcgattttcggtggggtttttataattaggaaagaatagttttgtttttttttatgattaaaagaagaagttatattttttttatgatattaaatatttcgatttaatttggtagttaggaaggttgtatcgcggaggaaggaaacggggcgggggcggatttttttttaatagagtgaacgtatttaaatacgtttttgttggtaggcgggggagcgcggttgggagtagggaggtcggagggcggtgtggggggtaggtggggaggagtttagttttttttttttgttaacgttggttttggcgagggttgttttcggttggtgttttcgggggagatttaatttggggcgattttaggggtgttatattcgttaagtgttcggagttaatagtatttttttcgagtattcgtttacggcgtttttttgtttggaaagatatcgcggtttttttagaggatttgagggatagggtcggagggggttttttcgttagtatcggaggaagaaagaggaggggttggttggttattagagggtggggcggatcgcgtgcgttcggcggttgcggagagggggagagtaggtagcgggcggcggggagtagtatggagtcggcggcggggagtagtatggagttttcggttgattggttggttacggtcgcggttcggggtcgggtagaggaggtgcgggcgttgttggaggcgggggcgttgtttaacgtatcgaatagttacggtcggaggtcgatttaggtgggtagagggtttgtagcgggagtaggggatggcgggcgattttggaggacgaagtttgtaggggaattggaattaggtagcgtttcgatttttcggaaaaaggggaggttttttggggagtttttagaaggggtttgtaattatagatttttttttggcgacgttttgggggtttgggaagttaaggaagaggaatgaggagttacgcgcgtatagatttttcgaatgttgagaagatttgaaggggggaatatatttgtattagatggaagtatgttttttattagatataaaatttacgaacgtttgggataaaaagggagttttaaagaaatgtaagatgtgttgggattatttagtttttaatttatagatatttggatggagtttattttttttattaggagggattattagtggaaatttgtggtgtatgttggaataaatatcgaatataaattttgatcgaaattatttagaagcggtcgggcgcggtgttttacgttttgtaatttttttattttgggagattaaggcggggggaattatttgaggtcgggagttcgagattagt

SEQ ID NO: 69 - DNA, 1145 bp, Artificial Sequence
  chemically treated genomic DNA (Homo sapiens)
gggtacggaggtattgcgttatttagggtaagatttcgttttttttttagttttttttttaggatatttaatattttgtgaaatttagagattttgttttagtcggatttagagaaatttagcgggaaaggagaggttaaaggttgaatttaatggtgtaaggttttacggttcggttattttttgttttgacgtcgcggggttagcgggagaagaaagttagtgcgtttttgggcgtaggggttagtggggttcggaggtataggtatttcgcgatattttaggtttttcgatttacgtttttggtagtttcgattatttatagttttagtagagtacggggcgggggtagaggggttcgttcgggagggttgttattttttaaaatttttgcgggttgtttagttatagttttttttgtttgggtgtgtttttcgttcgtttttttttttcgttttaggttattgtttttaatttcgaataaaaattgtagttaattttcgaggtagttttattgtttagcggattttagtttttgttaggttcggttcgttattttcgtttcgtttttcgtcggtttttgtttcgcgtttagggattttttagtttttttcgttcgcgtttttcgttcgtttcggatattatggataagttttggtggtacgtagtttggggattttgtttcgtgtcgttgagtttggcgtagatcggtgagtgttcgtcgtagtttgggtagtaagatgggtgcggggtgtttagcgcggattcggcggtagttttttcggttgagtcggttttgggggattggagttaagtgagttgtttgcgaagtgtattgggtttcggaaagtagggttgggatttgcgttaaatcgttggagaatgtgtttgtggaagtattatttggttgaaagaaaaagagaaagagaagaaagtttgttgggtaggttgtcggcgcgtagttttgggcgaggtcgttagagttgtagtatatggtagaaagtaatcgttttttcggatgcgtatagtcgttgtttggattaataggtttttgtgtttaagggttcgttaagttttatcgggttgtgtttaggtagggtagagttgggcggggtagagattggggttggaatagggcgagtggt

SEQ ID NO: 70 - DNA, 1145 bp, Artificial Sequence
  chemically treated genomic DNA (Homo sapiens)
gttattcgttttgttttagttttagtttttgtttcgtttagttttgttttgtttagatatagttcggtggggtttggcgagtttttgggtataggagtttgttagtttagataacgattgtgcgtattcgggagaacggttattttttgttatgtgttgtagttttagcgatttcgtttaaaattgcgcgtcggtagtttgtttaataaattttttttttttttttttttttttttaattaaatggtgtttttatagatatattttttaacggtttagcgtaaattttagttttgtttttcggagtttaatgtatttcgtagatagtttatttgattttagttttttagggtcgatttagtcggaggggttgtcgtcgggttcgcgttgagtatttcgtatttattttgttgtttaggttgcggcgggtatttatcgatttgcgttaggtttagcggtacgaggtagagtttttaggttgcgtgttattaaaatttgtttatggtgttcggagcgaacggagggcgcgggcgaaaggagttggaggatttttgggcgcggggtaggggtcggcggaggacgggacgaggatggcggatcgaatttggtagaggttggggttcgttgggtaatgaggttgtttcggaagttggttgtagtttttattcgaggttgaaaatagtgatttaagacggagggagggagcgagcgaaggatatatttaagtaaggggggttgtgattaagtagttcgtagaggttttaagaagtagtagttttttcgggcgggtttttttgttttcgtttcgtgttttgttgaggttgtaaataatcggggttgttagggacgtgggtcggggaatttggagtgtcgcggggtgtttgtgttttcgagttttattggtttttgcgtttagagacgtattggtttttttttttcgttggtttcgcggcgttaggatagaggatgatcgaatcgtaaaattttgtattattgggtttagtttttggttttttttttttcgttaaatttttttgaattcggttggagtaagatttttgggttttataggatgttggatattttgggagaggagttggagagagggcgaggttttgttttgggtggcgtagtgttttcgtgttt

SEQ ID NO: 71 - DNA, 2221 bp, Artificial Sequence
  chemically treated genomic DNA (Homo sapiens)
taatgacgatgtgtagtaggttttttagagttaagttggcgattaagatattgggatcgtttcgtatgtatttgtttttgtagataatttttagaagtgtggagttttcgatgatttttagtacgaatataaggtaggatataatcgtgttgatgtatttgaaagtttttttgatttcgatgggtttttggtacgggggaggggagatggtgcgtggcggagattttgtcgttttgttttttttaggtattttcgtaggtgttaacgatcgcgttagattggcgttggaatttttgggttataaggttttagtgggtggcgttattatttttgcggtttgtaaaagcggagtggttttgttaggcgggaagttttttttttttttttagattcgcgataggtcgtaggtaagaattagcgtaattagggcgcgttcgtatagatttggaggcggttgtatgttgttatttgttttagaaggcgttcggtggtcgtttcgtagttttagagtttagagataagtagaggaaggaagataggatatttgggttagttgttcgagttaagtcgttgtaaacgttaatatcgttcgtagttttttcgttagtatttacgtttaaaagtaatttaagtttgcgcgttagtgggaaatttggcgtttatgattcgttagcgcgggtcgaaatttttttttgatgtttttttagttgttttttttttttcgcgtggttaggaggggtaaataatatgtagtggggcggggcgttttggaaggggtgtgttagggagggaatgatgggggttttaggtaaagtttcgaatttttttacgtaacgggaggaatatagatacgttttagttaagcgtgcgtgggaatcgcggaattaaggtatttagaggttaagggtttgtgttaagttttgtattttgtttcgtaggggaatttttatatttcgcgattgaattcgaaagatttttttcggcggatgaaagtcgttattttttggttggttgagttatagttttcgtagcgcgtttaggagtgcgtcggagattcggaaattcgtagagattttttaagttagtaggaatttggaaatcgttgttttttttaaacggttttaaatattcgcgtttttttttttatttaatttaattttaatttgttttttttataggtttaatttttatttttttaaaattttaaattagtaagttaaatcgaagttttagaataaggtttaattaatgattttaatttaatattaagttcgaatgtttatttttcggatttgataaattagatgtagagcgacgaatggagattattttttcgggaggcggaatttagttgggttttagtttgttttgggagaggagtacgttttttttgagttgtaggcgggttcggttttgacgaaacgttgcgagaatgttagatagtgtagtttttatcgtttgttcggggtttttgttgttattagataagtatttttatttatttatttttttttattaattatcgttagatttttttcgcgtttttcgatttcgttgtaatttttttttttgggcgatgtttggatagtattagtagtagttgttcgagggaggggggtagttttcgttcggggataggttttaaaaggttgtttatttgttagagttttacgttttttaaatgaatttaaattaagggtaagttattacgtattatgtgatattcggtagttttagattagaataaggttttgtattgaacgtgataattgaatttttaatgttaagtgttattttttttttaggtaaatgtttcgtcgttgtgatatttaaggttggtttgtgggcgttgttttttgttttgttttattttgttttgaagttttattttaagttaatattaattttaatacggaatagttcgattttttttttttaggtttttttattgtttcgagagaggattataagtattttttattttttttagtatagttttttttttttttttttgttatagtatcggtgttaggtaattttaggtatttttatattgtatttatgatagatttgatgtttatcggagatatgaaaataattagaaagttgttatgtaaatttaatatgatatttatttattaggtagagtaatataataaggtttttttatttatttttgagttttatgtttatcgtagagaggaaaataatagcgattggt

SEQ ID NO: 72 - DNA, 2221 bp, Artificial Sequence
  chemically treated genomic DNA (Homo sapiens)
attagtcgttgttatttttttttttgcggtaaatatggagtttaagaatggatagaaagattttattgtattgttttatttggtaaataaatattatgttgaatttgtatggtagttttttgattatttttatgttttcgataagtattaagtttgttataggtatagtataaaaatgtttgagattgtttaatatcgatattgtggtaggaagagaggagaagagttgtattggggaaaatgaggagtatttgtaattttttttcggggtagtgagagggtttgggaagaaaagatcgagttgtttcgtgttggggttaatgttggtttgaaatgaaattttagggtaaaatgaagtagagtaaagagtagcgtttataaattaattttaaatattatagcggcggaatatttatttgaaagaaaagtgatatttggtattaaaagtttaattattacgtttagtgtagagttttgttttagtttggagttgtcgggtgttatatggtgcgtgataatttgtttttgatttgggtttatttgaagagcgtagaattttaataaataaatagttttttgggatttgttttcggacgaggattgtttttttttttcgggtaattattattgatgttgtttaggtatcgtttaaggggaaaggttgtagcggggtcggaaggcgcgggaggagtttggcggtgattgatgggaagggatgaatgaataaaagtatttgtttgatggtagtagagatttcgagtaaacggtggaggttatattgtttggtattttcgtagcgtttcgttagagtcggattcgtttgtagtttaagggaggcgtgttttttttttagagtaggttggaatttagttgggtttcgtttttcgggaaggtggtttttattcgtcgttttgtatttggtttgttagattcgagaggtaaatattcgggtttggtgttgaattaaaattattgattgaattttattttggggtttcggtttggtttattagtttgggattttaaaaaaataaaaattaagtttatagagagggtaaattaaaattaggttgggtaaaggaaggagcgcgagtgtttgaagtcgtttggagggaatagcggtttttaagtttttgttgatttgagaagtttttgcgggttttcgaattttcggcgtatttttgggcgcgttgcgggagttgtagtttagttagttagggagtagcggtttttattcgtcgggaggagtttttcgagtttaatcgcggggtatagaggtttttttgcggggtaaaatgtagagtttgatataagtttttggtttttaggtgttttaatttcgcggtttttacgtacgtttaattaagacgtgtttgtatttttttcgttacgtgaaagagttcggagttttgtttgggatttttattattttttttttggtatattttttttagaacgtttcgttttattgtatattatttattttttttggttacgcgggggaagaaaaatagttgagagggtattaggaaggagtttcgattcgcgttggcgagttatgagcgttaagttttttattggcgcgtaaatttgagttatttttgagcgtggatattggcgaagaggttgcgggcggtattagcgtttgtagcgatttggttcgggtagttgatttaagtgttttgtttttttttttttgtttgtttttaggttttgaaattgcggagcggttatcggacgttttttggagtaggtagtagtatgtagtcgtttttaagtttgtgcggacgcgttttggttgcgttggtttttgtttgcggtttgtcgcggatttggggagaggagagaggtttttcgtttgatagggttatttcgtttttgtaaatcgtagagataatgacgttatttattaagattttatggtttaagggttttaacgttagtttggcgcggtcgttggtatttgcggaggtgtttaaaggagataggacggtaggattttcgttacgtattattttttttttttcgtgttaaggatttatcgagattaaggagatttttaaatatattaatacggttgtgttttgttttgtgttcgtgttggggattatcgggaattttatatttttgagaattatttataagaataagtgtatgcgaaacggttttaatattttgatcgttagtttggttttgggagatttgttgtatatcgttattg

SEQ ID NO: 73 - DNA, 2172 bp, Artificial Sequence
  chemically treated genomic DNA (Homo sapiens)
atacggtaggtgtttaataaacgttagtttttattggtattattattattattggcgttaatgtatttatttattgtagtgaggtagaacgtttttgtggttacgagtgtgattaggttgatttattattaagaggtggaggatagggaaggtcgtatagtgttttattataaggaaaagaggattagtacgtttttttttgggaagggaaaaaaaaagagaaggaaattgaaagtatacggtcgatttttttttaattataaagtattggatttacgggagggtatgcgggggattgtgtaagtatataggggtgtgggggaggaaggttaatgaatagatttattgtaaagggaggggtgatgaggtttatcgtttgaggggaaggggagtagaaaattttatagatttttgtattatagtgagaggagagaaaagttattatatagattgatttaaagtagagagggaaaaggttatggattgagttattgaaaatagggagatgtaaagtattaaattaatttattattaaaaaggagagaattttaagcgttagagcgatagtttacgaaaaagaggagatagggtaatggattgatagttaaagggacgtgaatttaaatatgaagattgatttattataaaatggtggtggtggtggtggggggggggggtggttttgaaaaaagttatggattgatgtattgggggattggaggaggtaggaatataaatttaggtagatttattgttaaagagggatgcggaggagtgcggcgttacggattgattcgttacgatgtataggaagggtggaataaataaggttacggacgggttttttgaaagttgaggttaggagaaatttaaatatttagatatatttattattaagggggttgaatattgttataggttagttttttataagtgggggtgggtggggggcgggtgggggtaggggtagggggaaagtttatggacgagtttattttaagttggcgtggggaaaaatataagtacgtagatcgatttattatataacgggagggggaggttaggttacggttagatttattataagggacgaagggtttgagtaatgttatacgtaggtttattagtcgtggtggtggcggcggggagtcgaatattagtaggttatcggttaagttatattttttgcgcgggggcgggaaggatacgtggggttacggattgggttttttattttttaggtttagagtttatttgtgtgtagcgtggcggtggcgttggtaatgttggtagtttcggggggcgggggttttatacgcggttttatcgttttttaggtttgggtttcgaggcggcggtggaggtggtggtggcggtggcggcggtagtatttagaagtcgtttttgcgtttttttatagtttacgtgggttcgaggaggaggagtttaatgtttcgtcgttcgttgattggttaaagcgttattaatcggtcgtaaggtttcgaggggttgggggacgggtttttttttatagagttgtgtcgtgattggcgtaaggggaaatgatggaacgtttacggtttttggagtttcgaggaggcgcgttcggtttttacggtgttttacgtcgattggtttaaggattgacggattgtgagtaattgaaaaggttcggggtttgtgtcgggggggcgggggtttgttttatattgattggtttatatgggattgatggaagatagtttttaaggacgggggtgggtggttttgtttttttttgattggcggacgagggatttttagatttttgttaaaatattaagggggcggtgtcgtacgttatgttgtttagcggaagtagggtttgtatagaaatgggcgtagtagtcggcgggagtgggtcggattgggtttcgcgtaggcgggtagggtagttttacggttagataagattatagagttgggtaaagacgaatttagaatatagcggaggtaggagggtaggatggttgttaggtatacgaaagagtattgagtggtagaaacgaaatgtttttagagggtagggttgaattgcggttagagttaaaaaggggaggaatttggttttgtattgattggcggtggttggatttaatttagaataggggttcgattagggagagcgggatt

SEQ ID NO: 74 - DNA, 2172 bp, Artificial Sequence
  chemically treated genomic DNA (Homo sapiens)
gatttcgttttttttagtcgggtttttattttaggttgagtttagttatcgttaattaatgtagagttaggttttttttttttttaattttggtcgtagtttaattttgttttttgaaagtatttcgtttttgttatttaatgttttttcgtgtgtttgatagttattttgtttttttattttcgttgtgttttaaattcgtttttatttagttttatggttttgtttaatcgtagagttgttttgttcgtttacgcggagtttagttcgatttattttcgtcggttgttacgtttatttttatataagttttgttttcgttgagtagtatggcgtgcgatatcgtttttttggtgttttggtaggggtttagaagtttttcgttcgttaattagagaaaaatagggttatttattttcgtttttgggggttgttttttattaattttatgtaagttaattagtgtgaggtagattttcgttttttcgatataggtttcgagtttttttagttgtttatagttcgttagtttttgagttaatcggcgtggagtatcgtgaaggtcgaacgcgttttttcgggattttaggggtcgtgagcgttttattatttttttttacgttaattacggtatagttttgtagggaagggttcgttttttaatttttcgaggttttgcggtcgattaatagcgttttggttaattagcgagcggcgggatattgggtttttttttttcgggtttacgtgagttgtagggaaacgtaggggcggtttttaggtgttgtcgtcgttatcgttattattatttttatcgtcgtttcggaatttaggtttggggggcggtggggtcgcgtatggagttttcgtttttcggagttgttaatattgttaacgttatcgttacgttatatataggtgagttttgggtttggagggtggagggtttagttcgtgattttacgtatttttttcgttttcgcgtagaggatgtggtttggtcggtggtttgttggtgttcgatttttcgtcgttattattacggttggtggatttgcgtgtggtattgtttaagtttttcgttttttatagtggatttgatcgtggtttaatttttttttttcgttgtataatggatcggtttgcgtgtttatgtttttttttacgttaatttagggtggattcgtttataggttttttttttatttttatttttattcgttttttatttatttttatttatagggagttagtttgtgatagtgtttagtttttttaatagtaggtgtatttgagtgtttggattttttttagttttaatttttaggagattcgttcgtggttttatttattttattttttttgtatatcgtagcgaattaattcgtggcgtcgtattttttcgtatttttttttaatagtgagtttatttgagtttgtatttttgttttttttagttttttaatgtattagtttatggttttttttaaaattattttttttttttattattattattattattttatagtggattagtttttatgtttggatttacgtttttttagttattagtttattgttttgttttttttttttcgtagattgtcgttttagcgtttggggtttttttttttttaatagtgggttagtttagtgttttatatttttttatttttagtagtttagtttatagttttttttttttttgttttgaattagtttgtgtgatggtttttttttttttttattgtggtgtaggagtttgtaaggttttttgttttttttttttttagacgatgagttttattatttttttttttgtagtggatttgtttattggttttttttttttatatttttgtatgtttgtatagtttttcgtatattttttcgtgagtttagtgttttgtaattgggggaagatcggtcgtgtatttttaatttttttttttttttttttttttttttagaagagaacgtgttgatttttttttttttgtgatggagtattgtacggttttttttgttttttattttttaatagtgggttagtttggttatattcgtaattataaagacgttttgttttattataataagtgaatatattagcgttagtgatgatagtaatgttaataggagttagcgtttattgagtatttgtcgtat

SEQ ID NO: 75 - DNA, 3289 bp, Artificial Sequence
  chemically treated genomic DNA (Homo sapiens)
tttgtgtttacgtattatgtgtgttttttcgtttttttttttttttatgagtgagaaaaaaaagcgtttaaatttttattaatataaattaatgatatataatgatgaaattttgtttttatttttgtttgtgatagggaatgtaaaaatagtaagtggtttagttttacgaattttcgttttttgtttttttcgtttttgtcgggttggatttttaagaatggaggttagcgtatagtttcgcgcgggtcgtttagttttcggattcggcggatgatgttaggcgacgggagcggtcgcggtcgggtcggggaggtcgcggtttaggggagttgggagggagggtggtttcgttaggtcgacggcgcgttcggtcgcgcggcgttgtttggagacggttttggcggcgttgtgttgttgtaaatagtcgtttttttgttattatttatagtaggattttttggttttcgggcgcggcggttggaggtaggtttgcggttcggtttttcgcgcgtttcgaattattcgttcgtcggttttattttgtttcgtttttttttaggtgtttatcgcgggtttcgattttcgggttcgaagagtggagaagggaagatcggggttgtgcggggatatgcgttttcgcgttttggaggtggttagcgcgttggggttgagtttcggtagcgtgatttcggttgttttacgtagtagggtaggagattggggggcgtggtatattttggagtattttgtttttttaaagtttcgtgttttaggacgtggagtcgtttttggggttttagtagtcgaggtatttcgtttaggcgtagttggatattgtttttttagttttcgttttttattttttaagttcgcgttggaaaattattcgttgcgggttttcgtaagtatagttttttggcgggatcgaattagtttttagcgtagatttgagtttttcgtaggaagtatatttcgttttgttatttcgaattgattattttgtttatataattatatttcgtattttttatttttggggtttagtttagaatcgggtagatattttttttaaatgttttcgtacgtaggttttgtatagtgtttatttgttggtgttttagggatttgatagtttttttaatatttttatatatggtcgagaaaaataaataaataaatgcgttgttttttttaaaaaaataaataaataaagtatttagtatcgtaaagtaggttatcgtatttttttattttggattttttattttttgtttttaaacgtaggaatagtgttagtattgttcgagttcgagggttggaggttaggggatgaaggtttgtttttacgttttgtattgaattagggttagaattggggatgggggtaggggcgtattttttcgggagtcgaggtttaagttttcggggttttgtattcgatgtcgttttttttatttttgagttttagaattgtttttagttttcgtataagggtaaaaaggcgttttttgttttatttttttcgatttcgggaataagggttcgtattgaattaggtgcgaatgtttttttttattttgcgtcgttttcgtttttttttttttagtcgcggttttcgttttttttcgtattgtattttcggtgttggttgtagttcgcgagtagttttcgttaatttttttttttttatataggatgtttatattaggatatttgcgttagtaggtttttacggtttttttttgtagttttggggggagttattttcgaaattttttattttggggggtttacgagatttttgagataggaattgcgaaatgtttacgagattaggatacgcgttaaggcgggggtagggagttgcgagcgttggggacgtagtcgggcggtcgtagaagcgtttaggttcgcgcgttatttttttggcgttatcgtggttgagttcgtgacgtttatatttatttataaaacgtttgttataaaagtagtggttgcggcgtttcgtattttaatcgtatttgtagcgagtatttgagaagttaagattgagtcggcggtcgcggcgtagcgaacgagtagtgatcgtgtttttatttagttttgttttatagcgtttatttgttttcgtttttcggtttttcgttcggttttgtttaatcgttacgatgatgttttcgggttttaacgtagattacgaggcgttattttttcgttgtagtagcgcgttttcggtcggggatagttttttttattattatttattcgtagattttttttttagtatgggttcgtttgttaacgcgtaggtaaggttggtttttcgtcgtcgcggggtcgggggtttggggtcgcggaggaggagatatcgggcgggacgttttagtagatgagtagggggtttttttgtgtttggagggaggttgtcgtggtcggagcggtgtcggttcgggggttcgggatttgttttgagcgtacgtacgtttgttatagtaagaattggtttttttttcgggaggtaggttcgttttgagtaatttttggtttgtattttaggacggatttttgatattagttggagtagacgtgttttaagtataaattcgttaattagagtttggttttttcggggaggtggtagaaagcggtaattttttttttttcggtagtttggagtacggaggagggatgagggaggagggtgtagcgggcgggtgtgtaaggtagttttattgataaaaagcgagtttattttggagatttcggagcggcgtttgcgttagcgtagacgttagggatatttataataaatttttttttaagtaagtgatgttgaagggataacgggaacgtagcggtaggatggaagagataggtattgcgttgcggaatgtttgggaggaaaagggggagattttttatttaggatgagggatatttaagatgaaatgttcgtggtaggatcgtttttttttattgttgtatgcggtattgggaattcgttttatttgtgttcggaatttgttcgtttacgtcggttttttttttttgttttgttttaggatttttgtacggatttggtcgtttttagtgttaattttatttttacggttattgttatttcgattagttcggatttgtagtggttggtgtagttcgttttcgtttttttcgtggttttatcgtagattagagttttttattttttcggagttttcgtttttttcgttggggtttattttagggttggcgttgtgaagattatgataggaggtcgagcgtagag

SEQ ID NO: 76 - DNA, 3289 bp, Artificial Sequence
  chemically treated genomic DNA (Homo sapiens)
ttttgcgttcggttttttgttatggtttttataacgttagttttggagtaagttttagcggagggggcggggatttcgaaagggtgaggggttttggtttgcgatggggttacggaggagacgagggcgggttgtattagttattgtaggttcggattggtcgagatggtagtgatcgtgggaatgaagttggtattggagacggttaggttcgtgtagaagttttagaataaaatagaaggggaaagtcgacgtgagcgagtaggtttcggatataggtggggcgagtttttagtgtcgtatgtagtagtgaagagaaacgattttgttacggatattttattttaaatgttttttattttggatgaaaggttttttttttttttttttaggtatttcgtagcgtagtgtttgttttttttattttgtcgttgcgttttcgttatttttttagtattatttgtttgaaagggggtttgttataaatatttttgacgtttgcgttgacgtaggcgtcgtttcggagtttttagaatgaattcgttttttattaatgaaattgttttatatattcgttcgttgtattttttttttttatttttttttcgtgttttaggttgtcgggggaggggggattgtcgttttttgttattttttcggagaagttaggttttagttagcgagtttgtgtttgggatacgtttgttttagttaatgttagagattcgttttggagtgtagattagaggttgtttagaacgaatttgtttttcgaagggggaattaatttttattatggtaagcgtgcgtgcgtttagagtaagtttcgagttttcgagtcggtatcgtttcggttacggtagtttttttttaggtataagggagttttttatttatttattggagcgtttcgttcggtgttttttttttcgcgattttaagttttcggtttcgcggcgacgggaagttagttttatttgcgcgttgataggcgagtttatgttggagaaggagtttgcgggtgagtggtagtaagagaggttattttcggtcggggacgcgttgttgtagcgggaggatgacgtttcgtagtttgcgttgaagttcgagaatattatcgtggcggttaggtaaagtcgggcgaggggtcgaggggcggagataggtgggcgttgtggagtagagttgggtaggagtacggttattgttcgttcgttgcgtcgcggtcgtcggtttagttttggttttttagatgttcgttgtagatgcggttggagtacgaggcgtcgtagttattgtttttataataagcgttttatgaatgagtgtaaacgttacgggtttaattacggtggcgttagaggggtggcgcgcgggtttgggcgtttttgcggtcgttcggttgcgtttttagcgttcgtagttttttgttttcgttttggcgcgtgttttaatttcgtgagtatttcgtagtttttgttttagaggtttcgtgggttttttaagatgaggggtttcggggatggttttttttagggttatagggaaaggtcgtggaaatttgttgacgtagatgttttaatatggatattttgtgtaaggggggagggattgacgggaattgttcgcgggttgtagttaatatcgagggtgtagtgcggggggaggcgggggtcgcggttgggggaggggaggcgggaacggcgtagaatgagagagaatattcgtatttggtttaatgcggatttttgttttcgaggtcgggggggatggggtagagagcgtttttttatttttgtacggaaattgaagatagttttgaggtttagagataggagaaacggtatcgagtataggatttcgaggatttaagtttcggttttcgaaggaatgcgtttttatttttatttttaattttagttttaatttagtgtaaagcgtggaagtagatttttattttttaatttttagttttcgggttcgagtaatattagtattgtttttgcgtttggaagtagaaagtggaggatttaaaataagagaatacgataatttattttacgatattgggtattttatttatttatttttttaaagaagatagcgtatttatttatttatttttttcggttatgtgtgggaatattaaggaaattgttaaatttttgagatattagtagataaatattgtgtaaaatttacgtgcgaagatatttgaagggggtgtttgttcggttttgagttgggttttaggggtagggagtgcgaggtgtggttatgtgggtagggtggttagttcgggatgataaggcggggtgtgttttttgcggggaatttaaatttgcgttgagggttggttcggtttcgttaggaagttgtgtttacgggagttcgtagcgggtgattttttagcgcggatttggagggtggaggacgggggttggaaggatagtgtttagttgcgtttgggcggaatatttcgattgttgggattttaggagcggttttacgttttggaatacggggttttggggaggtaaggtgttttagagtgtgttacgttttttaattttttgttttgttgcgtaggatagtcggggttacgttgtcggggtttagttttagcgcgttggttatttttagggcgcgaagacgtatgttttcgtatagtttcggtttttttttttttatttttcgggttcgggggtcggggttcgcggtgggtatttggagaggggcgaggtaggatgaggtcggcgggcggatagttcggggcgcgcggggagtcggatcgtagatttgtttttagtcgtcgcgttcgggagttaggagattttgttatagatagtaatagggaagcggttgtttatagtaatatagcgtcgttagggtcgtttttaggtaacgtcgcgcggtcgggcgcgtcgtcggtttggcgaggttatttttttttttagtttttttgggtcgcggttttttcggttcggtcgcggtcgttttcgtcgtttgatattattcgtcgggttcgggggttgagcggttcgcgcgaggttgtgcgttaatttttatttttagagatttaattcggtaggagcggggagggtaggaggcggggattcgtggaattgggttatttgttatttttgtattttttgttataggtagaggtgaaaatagaattttattattgtatgttattggtttatgttggtgggaatttaggcgttttttttttttatttataaaaagggagggaaacggaaaaatatatataatacgtaaatataga

SEQ ID NO: 77 - DNA, 3812 bp, Artificial Sequence
  chemically treated genomic DNA (Homo sapiens)
agcgagatcgtatggttttatttataagtgggagttgaataatgagaatatatggttatatggcggcgattaatatatattggtgtttgttgagcggggtgttggggagggagagtattaggaagaatagttaagggatattgggtttaatatttgggtgatgggatgatttgtatagtaaattattatggcgtatatatttatgtaataaatttgtatattttttatatgtattttagaattttaaataaaagttggacggttaggcgtggtggtttacgtttgtaattttagtattttgggaagtcgaggcgtgtagattatttaaggttaggagttcgagattagttcggttaatatggtgaaatttcgtttttattaaaaatataaaaattagttagatgtggtacgtatttataattttatttattcgggaggttgaagtagaattgtttgaattcgagaggcggaggttgtagtgagtcgtcgagatcgcgttattgtattttagtttgggttatagcgtgagattacgttataaaataaaataaaataatataaaataaaataaaataaaataaaataaaataaaataaaataaaataaaataaaataaaaaaataaaataaaataaaataaaataaagtaatttttttttttttaagcggtttttattttttttttttgttttgtgaagcgggtgtgtaagtttcgggatcgtagcggttttagggaattttttttcgcgatgtttcggcgcgttagttcgttgcgtatatttcgttgcggttttttttttgttgtttgtttattttttaggtttcgttggggatttgggaaagagggaaaggttttttcggttagttgcgcggcgatttcggggattttagggcgtttttttgcggtcgacgttcggggtgtagcggtcgtcggggttggggtcggcgggagttcgcgggattttttagaagagcggtcggcgtcgtgatttagtattggggcggagcggggcgggattatttttataaggttcggaggtcgcgaggttttcgttggagtttcgtcgtcgtagttttcgttattagtgagtacgcgcggttcgcgttttcggggatggggtttagagtttttagtatggggttaattcgtagtattaggttcgggttttcggtagggtttttcgtttatttcgagattcgggacgggggtttaggggatttaggacgtttttagtgtcgttagcggtttttagggggttcggagcgtttcggggagggatgggatttcgggggcggggagggggggtagattgcgtttatcgcgttttggtattttttttcgggttttagtaaatttttttttgttcgttgtagtgtcgttttatatcgtggtttattttttagttcgaggtaggagtatgtgtttggtagggaagggaggtaggggttggggttgtagtttatagtttttcgtttattcggagagattcgaatttttttattttttcgtcgtgtggtttttatttcgggttttttttttgtttttcgtttttttcgttatgtttgtttttcgttttagtgttgtgtgaaattttcggaggaatttgtttttttgttttttttttgtatttttgattttttttcgggttgttgcgaggcggagtcggttcggtttttatatttcgtattttttttttttcgtaggtcgttgcgcggttttgcgtatgttgttggtagattagggttagagttggaaggaggaggtggtgatcgtggagacgtggtaggagggtttatttaaagttttttgcgtaagtgattatgttcgggtaaggggagggggtgttgggttttagggggttgtgattaggatcgggggacgtttaagtttagtgtttttttttgagttatgttttttttaatagttatacgggtagttttttaagttttaggacggagattttattttgtattagtttaatattattttgcgttatttgggtcgtatttttggtgagttttgaatttttaagtttagggtaggtatgggtaagtttttgttttcggagtttttttgtttaaattagttgtttcgtagttttttggagtggaggaaattgagatttattgaggttacgtagtttgtttaaggttaagtttgggtgtttgtaatttttgttttgtgttaggttgttttttaggtgttaggtgagttttgagtatttgttgtgtggtagttttttatttttttacgtatattttttttttttttttttaggttggggtttatagatagttttttggttggtttatttttagtgattgtgtgttgattaggcgtttagttacgcggtttgtttttttttatttaattttagggttttatgggaaggattagtaggaggtagttttggtggatatggtgaatgacggcgtggaggattttcgttgtaaatatattttttttatttatattaattatgtgagtatttgtattagggttgggtattgggggttgaataaagaaaggggttttttgtgtttttattttttttattttttaggtggtttgggttgatttttttttgggttagggtgtaggggttgggttagttttgggttaggggtttaggggtttgggataagatataatttgtatttttattgtttgggatattaattagttaagtaacgggttatgggggcgagtgtaaggatagagatttttagtaattggtggtttttgattttttggggtggcgagggttttttggagtagttagaggtggaggaggatttgtcgttagtttttggatggaggtgttggtatttttagttgaggaaaatatgtagatatagagtatatttggggatttgggattagtttagtagaggtagcgtgtgtgcgcgtgcgtgtgtatgtgtgtgcgtgtgtgtgtgtacgtttgtatttgtgtcgggtgggtaaggagatagagatgggcgggtagtaggtttaggtttcgaaggttttgaatttattggtttggagttttttaagggtaatgggggttattgagaagtttgaatagggttgtgtttgaatgtgaggtttagaaggattttttagagaagttagttttaaagtttttgtaattatttggtgagagaatttagtaaggatggataggtagaatggaatagagatgagttggtagttgaagtggataggatttggtattagtttggttgtggggagtaagtagaggagaatttgggattttggtgtttggtttggggtagacgggggtgttttaggggttgggagggatgagagtaggatgatatatggtggtgtttggtaggaggcgggtaaggatgattatgtgaaggtattgttcgggtaattgaagttttttgagattttgttgttttagaattagggaggtaagatttttattgtgggagattaggtgagtatttggttttatgttgtttttttttcgttattttttgtttttagatggatataggtgtgagttatttgtttagtaaagtagagtagatttaggggatgggtttaggttttttgtttttaatttttttagtttgttttcgttggttgagtttttggtttttttgttttgtagatttttttcgttgattataatttgttggatttgttgttgatttatgaggttttagtttttggttgtttggatgcgttttttttgtttttagtatatgtggggcgttttagtgttcggtttaagtttaaggtttttttggttttttttgagtacgtgaatttttttattaatggtaacgggaaat

SEQ ID NO: 78 - DNA, 3812 bp, Artificial Sequence
  chemically treated genomic DNA (Homo sapiens)
gtttttcgttgttattgatggggaggtttacgtatttaggggaggttaggaaggttttgagtttgggtcgggtattgaggcgttttatatatgttgagagtagggggaacgtatttaggtagttaggggttaggattttatggattagtagtaagtttagtaggttgtagttagcgaaggagatttgtagggtaggggggttagggatttagttagcgggagtaggttggaggaattgggggtagagggtttaagtttattttttaggtttgttttgttttgttaaataaatggtttatatttgtgtttatttggaagtagagggtggcgaggaaggaatagtatggggttagatgtttatttggttttttataatgaaggttttgtttttttggttttgggatagtagggttttaaaaggttttagttgttcgggtagtgtttttatatagttatttttgttcgttttttgttagatattattatgtattattttatttttattttttttagtttttgagatattttcgtttgttttaggttagatattagagttttagatttttttttgtttgttttttataattaggttagtattaaattttgtttattttagttgttaatttatttttattttattttgtttgtttatttttgttgggtttttttattagatgattgtaaaagttttagagttggtttttttggaggatttttttagattttatatttagatatagttttgtttagattttttaatggtttttattgtttttaggagattttaaattagtgggtttaaggttttcgggatttgggtttattgttcgtttatttttatttttttatttattcgatataaatgtaagcgtatatatatatacgtatatatatgtatacgtacgcgtatatacgttgtttttgttgaattggttttaggtttttaaatgtgttttgtgtttgtatattttttttagttaaaagtgttagtatttttatttagaaattggcgataaatttttttttatttttggttattttaggaagttttcgttattttaggagattagaaattattagttgttggaggtttttgtttttgtattcgtttttatgattcgttatttggttggttgatgttttaggtaataagggtgtaggttgtgttttgttttaggtttttgggtttttggtttagagttgatttagtttttgtattttgatttaagaaggggttagtttaagttatttgaggggtaaggggggtgagggtataagaagtttttttttttgtttagtttttagtgtttaattttggtgtagatgtttatatagttggtgtagatgagggagatgtatttgtagcggaggttttttacgtcgttatttattatgtttattagggttgttttttgttggttttttttatagagttttggggttgggtggaggggagtaggtcgcgtgattgggcgtttgattaatatatagttattggggatgggttaattagggggttgtttgtgagttttagtttgggaggaggggaagaggatgtgcgtggaaggatgagagattgttatatagtaggtgtttagagtttatttgatatttgggaggtagtttggtatagggtaaggattgtaggtatttaggtttgattttgggtaaattacgtaattttagtgggttttagttttttttattttagagggttgcggggtagttgatttaaataaaagggtttcgggggtagaggtttgtttatgtttgttttggatttggaggtttaagatttattaagggtgcggtttaggtgacgtaggatggtattggattggtatagggtgaggttttcgttttggaatttggggagttgttcgtatagttgttgggggaggtatggtttagggaggggtattgagtttgggcgtttttcgattttagttatagttttttaaggtttagtattttttttttttgttcgggtatggttatttacgtaggaggttttgagtgagtttttttgttacgtttttacggttattattttttttttttagttttggttttgatttgttagtagtatgcgtagggtcgcgtagcggtttgcggggagggagaagtacgagatgtggggatcgggtcgatttcgtttcgtagtaattcggggaggggttaggagtgtagggagggaatagggaaataggttttttcgaagattttatataatattggggcggggagtaggtatggcgggagaggcggggaataggaaggaggttcggggtaaaagttatacgacggagggataagggggttcggattttttcgggtgggcgaggggttgtgggttgtagttttagtttttgttttttttttttgttagatatatgtttttatttcgaattgggaaatagattacggtgtagggcggtattgtagcgaataaagaaaagtttgttggagttcgggggaggatgttaaggcgcggtgagcgtagtttgtttttttttttcgttttcggggttttattttttttcgaggcgtttcgggttttttgaaagtcgttaacggtattggggacgttttgggttttttaggttttcgtttcgggtttcgaggtgggcgaggagttttgtcgggagttcgggtttgatgttgcgggttggttttatgttgggagttttgagttttattttcggggacgcgggtcgcgcgtatttattggtggcgaagattgcggcggcgaaattttagcgaaggtttcgcggttttcgagttttataagggtggtttcgtttcgtttcgttttagtgttgagttacggcgtcggtcgtttttttggagggtttcgcggattttcgtcggttttagtttcggcggtcgttgtatttcgggcgtcggtcgtagaggggcgttttggagttttcggagtcgtcgcgtagttggtcggggaagttttttttttttttttaggtttttagcggggtttagggagtaaatagatagtaggaagaggatcgtagcgaagtgtgcgtagcgaattggcgcgtcgggatatcgcggggggaaattttttaagatcgttgcgatttcggagtttgtatattcgttttatagggtaggggagaggggtggaggtcgtttagaggaaaggaaattgttttattttattttattttattttatttttttattttattttattttattttattttattttattttattttattttattttattttgtgttattttattttattttatgacgtagttttacgttgtggtttaggttggagtgtagtggcgcgatttcggcggtttattgtaattttcgtttttcgggtttaagtaattttgttttagtttttcgagtaggtggaattataggtgcgtgttatatttggttgatttttgtatttttagtagagacggggttttattatgttggtcgggttggtttcgaatttttgattttaggtgatttgtacgtttcggttttttaaagtgttgggattataggcgtgagttattacgtttggtcgtttaatttttatttgaagttttggggtatatgtagaggatgtgtaggtttgttatataggtgtgtgcgttatgatggtttgttgtatagattattttattatttaggtattaagtttagtattttttagttattttttttggtattttttttttttagtatttcgtttaataggtattagtgtgtgttgatcgtcgttatgtgattatgtgtttttattgtttagtttttatttataagtgagattatgcggtttcgtt

SEQ ID NO: 79 - DNA, 1267 bp, Artificial Sequence
  chemically treated genomic DNA (Homo sapiens)
atgaatttcgaaagttggattgtagagtaaacgagtgtagttaatttagttaggggtttgtaagagggagaaagagaaaaagattgtggaatggaaagttttttaatttaagttttttttaaggggtagttattttttgttttatagtttagggtttgtatgtgttttttttggagtggaaaaatatataagttataaggaatttaatagatagaaaggcgtatagaggaatttaaagtgtgggttggggggcgaggcggtgggcgggaggcgagcgggcgtaggcggaatatcgttttttaagttaagtcgtcgtaaataaaaaggcgtaaagggagagaagttggtgtttaacgtgagttaggagtagcgtttcggttttttttttgtttattttaaaagtattttttgtattgtttttaaggtgagaaataggaaagaaaacgtcggtttgtgcgttcgttgtttgtttttttggttgtttgtttttgtagggttgttgggagtttttaagttttgtgagaattttgggagttggtgatgttagattagttgggttatttgaaggttagtagttcgggtagggtttatcgaaagtttattcgtatatattaggtaatttaattttttattttgtgtgatagaagtagtaggaagtgagttgtttagaggtaggagggtttattttttgttaaaggggggattagaatttttttatgcgagttgtttgaggattgggatgtcgagaacgcgagcgattcgagtagggtttgtttgggtatcgtcggggtaggattcggaacgtattcggaaggttttttgtaagtatttatttggaaggagaatttgggatttttttgggaatttttcgtttcggttggattggtcgagtaagtttggaaaatggtaaatgattatttggattaattataggtttttagttggtttgtttgttataatttatgattcggggttgggaaaaagattaatagtttacgtgttaaaaaaggggtagagtttgatggagttgggtggatttttttatgttatttgtttttatatttagaggataagtatttttgtagatatttagtgtaagggagattatgtttgattgtatggatgttttgttagtgagttttgggtaaattttggatttttatattgcgagttcgtttttttgtatgttttaggagaaagtttttaaagtatgttttagtggattgatttaaatcgaatggtagtatcggtatattgtttaatgtag

SEQ ID NO: 80 - DNA, 1267 bp, Artificial Sequence
  chemically treated genomic DNA (Homo sapiens)
ttatattgagtagtgtgtcgatgttgttattcggtttgggttaatttattgaagtatgttttgagagtttttttttggagtatgtaggaagacggattcgtagtgtagaaatttaggatttgtttaggatttattgatagaatatttatatagttaaatatgattttttttgtattgaatgtttgtaaaagtgtttattttttaggtgtggaggtaaatggtatagaaaagtttatttaattttattaaattttgttttttttttggtacgtaggttgttggttttttttttagtttcgaattatgaattatgatagataagttagttaaaagtttgtaattgatttaaatgattatttattattttttaggtttgttcggttaatttagtcggggcggggggtttttagaaagattttaagttttttttttaagtaaatgtttgtaaaaagtttttcgaatgcgtttcggattttatttcgacggtgtttagataaattttgttcggatcgttcgcgttttcggtattttagtttttaaatagttcgtatgggggaattttggttttttttttggtaaagaatagatttttttgtttttgaatagtttattttttattatttttgttatatagaatgaaagattgaattgtttaatatatgcgagtgaattttcggtgaattttattcgggttgttaatttttaaatgatttaattagtttgatattattaatttttaggatttttatagagtttaaaaatttttagtagttttgtaaaagtagatagttagagaggtaggtagcgagcgtataagtcggcgtttttttttttattttttattttaaaaataatataagaagtgtttttaaaatgagtaggggaggagtcgggacgttgtttttggtttacgttgagtattaatttttttttttttacgtttttttatttgcggcggtttagtttggaaaacggtgtttcgtttgcgttcgttcgtttttcgtttatcgtttcgttttttagtttatattttaaatttttttgtgcgtttttttgtttgttaaattttttataatttatgtatttttttattttagaaaaagtatatgtaagttttaaattgtagaatagagaatggttattttttgggaaaggtttgggttgggaaattttttattttatagttttttttttttttttttttttgtaagtttttggttgaattgattgtattcgtttgttttgtaatttagttttcgagatttat

SEQ ID NO: 81 - DNA, 1266 bp, Artificial Sequence
  chemically treated genomic DNA (Homo sapiens)
agttacgtagtttttttattcggagagaagtcggagtattgggatagatttaggaggttagagcggaaattttgttcgggtgcgtggaatcggagttttcggtgcgcggcgttaggtatttatttgtatggttgagcgttaggatcgcgtatagtagtagggcgcgggcgagtatcgtagcggcgggtagggcgcggcgcgggggtaggttttgttgtttgagggcgtttggttgtggagttgaaggaggcgttgttgaggagtttttggacgtgtttttgacgtttattgtaagtcgtatgataattggtcgttaatcgagagaatttttttttttataagattgaaaattaagtttatgtgacgaaatgattgttttttttcgttttttcgtattttttataaattttttttttttttttttttaaaaaaattgcgtaagttcggtgggggtagggttttttatttacggaaatgagaaaatcggaaatttaggaagttgttttaatttgggagtagagggggtagtttttatttttttgtttgatttttttttttttttttcgagttttatcgttttaggcgtataggttttcgttagatgttttttttttttcgtagtttttgttcgagcgttttcgagagttagttttggattgatcgttttggatgggatatcgggggagggtagaaggatatttggttttttttttaggaatttgagcggttttgaggttcgggggcgtagggaattttttttttcgtcgtcgtcgtcgtgtttggtttgtacgtttttagagggtcgaggaagttacgtcgggatagattggggcgagtaaggttaagaaaggttgatatgttttatgttttagtgacgacgtttaataggttgtatatttgttttatatgtagtatatatatatatagttttttaaaaaatttttattttgtggaatgaaatagttatttttagtgtatatagttgtaatttatttttgtagttaagttgtttttaatagaagaaatattgtttttcgtatttttattttttttttgttttttggaaagagaggcgggaaaggtaaattttttttataatattggttttaagtagttattttgtaaatagttaatgtgagttttacgggttattaatataaagttttttgttttttgatggataaaggaagcggcgatggttagaatttgtagggacgttaaatgtttaaaacgtatgttttaaggtatttttttttttgatgcgtg

SEQ ID NO: 82 - DNA, 1266 bp, Artificial Sequence
  chemically treated genomic DNA (Homo sapiens)
tacgtattagggagagaaatgttttaaggtatacgttttggatatttagcgtttttgtaaattttggttatcgtcgttttttttgtttattagaaggtaggaaattttatattggtgattcgtggagtttatattaattatttatagggtaattgtttaggattagtattatgaggagaatttatttttttcgtttttttttttaagaaataaggagggggtgaaggtacggagaatagtattttttttgttgaaagtaatttagttataaagataaattatagttatgtatattgaaggtagttattttattttataaaataagagttttttaaaaagttatgtatgtatgtgttgtatatagagtagatatatagtttattaagcgtcgttattaaaatataaaatatgttagttttttttaattttattcgttttagtttgtttcgacgtgattttttcgattttttaaagacgtatagattagatacggcggcggcggcgggagaggggattttttgcgttttcggattttagggtcgtttagatttttggagaggaagttaagtgtttttttgttttttttcggtattttatttaaggcgattagtttagaattggttttcggaagcgttcgggtaaagattgcgaagaagaaaagatatttggcggaaatttgtgcgtttggggcggtggaattcggggaggagagggagggattagataggagagtggggattattttttttgtttttaaattggggtagttttttgggttttcgatttttttattttcgtgggtaaaaaattttgtttttatcgggtttacgtaatttttttaaggggagaggagggaaaaatttgtggggggtacgaaaaggcggaaagaaatagttatttcgttatatgggtttggtttttagttttataaaaaggaaggttttttcggttagcgattaattgttatacgatttgtagtgagcgttaggagtacgtttaggaattttttagtagcgttttttttagttttatagttagacgtttttagatagtaaagtttattttcgcgtcgcgttttgttcgtcgttgcgatgttcgttcgcgttttgttgttgtgcgcggttttggcgtttagttatataggtgagtatttggcgtcgcgtatcggggatttcggttttacgtattcgggtagagttttcgttttgattttttgggtttattttagtatttcgattttttttcgaatagagaagttacgtgatt

SEQ ID NO: 83 - DNA, 4511 bp, Artificial Sequence
  chemically treated genomic DNA (Homo sapiens)
ggagtattcgaacgcggaaatcgaggtgttagtttaaattgttcggtcggttttagttatagttggataatgttcggtttaggtttattataagttatatagttgtttttttcgtgtttaatttgtttgtgatagaaattaagggggtttcggtatttagtatttaggcggtggaatcggggttttacgtacggtttcgcgggtaggttttcggttaggattcgcggggagttacgtagttaggagggtggggttgtttatcgatttaggacgcggtaacggatcggggagggcggagttttagcgatcgttttttttttcgttcgtcggtattttttggtttttatttggtttcggcgcggtttgcgagttagcgaggttcgcgcggtgaagtattgttcgagtttcgagttcgagtttttttggttgtagtagttattgttcgtcgtgttgttttaggttatttcgaaagaaggcgttttcgtttcgtttatagtcgtattcgttcgttttttagttttgcgcgttcgtagtcgttaattatcgtttcggtcgcgtgcgtgcgtgtacgcgtgttagtgtgcgcgtgcgttcgggttagagtcgcgtcgtaatcgttaagattgaaacgtagatcgtcgggatttagtttttgttttattggggtaggaacgtcggggcggggatacgtacgtttcgtttttaggaatgattttatcgtttcggagttttatttatagattttatttattatagggaacgggggcgggtgttagcgttcgggtaagcgtataagagtggtttttggtcggaggcgagggcgggaaggtgcgggaagtgcgcgtgcgcggagtttgggttagtttgggttcgggttcgtttgtagcgggtggagtatttgcggagtcggtaatttaggttttttttttagttttcgcgtagaattagtttttttgtgtcgtcgggaaatcggtaattagaacgttttttgcgcgcggtatttaggtagttttcgagaatgtttgtattgtggtttgtttattttcgttttttttatacgttttcggtttcgcgtttattacgttcgtgtttcgttttatcgcgggtttttagtttaggtttcggggttcgtaatagtttaggtagacgagcgcgcggtagcggtagtggtaggtgaatttgtaatttgtagagaggtttggcggtgaggcggaggagttttaggtcggggaaatgtttcggagattgaagggaagttttagggagagggtcgttgttcgttaggtttcgtaggttcgatttattttagtgggttattttatattgttacgcggattttaatgttggttatttgggcgtttggaaatcggtcggaaggttataggtagagaggtttgtttaatagttggatttttatcgtttagtatagaattttttttttttttattggtaattaaaaaaataataataaaaaattgcgttttgtttttgttatttaggttggagtgtaatggcgcgatttcggtttatcgtaattttcgttttttgggtttaagcgatttttttgttttagttttttgagtatttaggattataggcgttcgttattatgtttagttaatttttgtatttttagtagagacggggttttattatgttagttaggttggttttaaatttttgattttaggtgatttattcgtttcggttttttaaagtgttgggattataggtttgagttatcgtattcggttttttattgggaacgtatatggaatatatttgtttatttatttgaaggaaaaattaaatatttttaatttacgtttgttttgtggttgttatttgtttttattttttttagattaagatattggtttttatatattttaatttttcgtttttatttttttttttatttattttagttaggtttgtttttttttttaggaaattgttcgggatagggtttttagcgatttgtgtattattaaatggaatttagtgttttattttttatttttatttttttagtattatttgaagtttgttttttttgatttttaggggttatatttttttagttttttttttattttttgtagtttttgtttagtttttttgtagattttgatttaatttttatattttacgatgaagtttgggtttagttttgattattggtttggtttgtttatatttatttgttttagatttacggttgaaatattgatttaaatttttagattagatttttcgtgttagtatttttattaggatgtttaaaagacgttttaagtgaatatggttaaaatttaatttttttttttttagttttattgttatatttgtttagttttttttttgtagtaaaaatggttattaggtttttagttattggagataaaagtttaaatttatttttgattttttttttgtttttatttttgataaatatgtttaaattattttgttttttatttttatggttattttatttttttttgagaacgttgtaatgttttagttttgttttttttttttttttttttttttttgagatagagttttattttgtcgttaaggttggagggtagtggtacgatttcggtttattgtaattttcgttttttgtgtttaagtaatttttttattttagtttttcgagtagttgggattataggtattcgttattacgtttggtttatttttttttattttttagtagatatgaggttttattatgttggttaggttggttttgaatttttgattttaggtgatttattcgttttcgtttttcgaagtgttgggattataggtatgagttatcgcgttcggttttttgtttattttttgtattttgttataattttgtgttttttttagttgaatttgtgatgtttttttgtatcggatgagagggtttttatgtatatatagatttgggatattatttatttataagtttttaaataggttagagtagtgatgtttaatttagattttatgttataataatttggggagtttttaaaatttattgatgtttagggtttatttttagtagttgatttaataggtttgcggtgggatttaggttagcggggaggattgtaaaagtatttttggtgattttagttggtgtttatttaggggagagtaatttttgtttgttggcgatttttaggggtgtagaaggattgttgggtgtgtggttgcgtgtatattttagtatttgatttattgggttagaaaagggtgtttgttaaataaagatttaataaaatttttgtttgtagggggtttattaaaggttttaaatttttttaggtttttttttataggtggtaatttttttttattttaaaggttttggagggggttatgagtgtttgagaagaggtaagtttgggaagatggatttcgaggatagtaggtataaatttttttttaagaagggttaaggtattttaaagataagaaatttaaaattagcgtatttttatatataagtagttatttttgtttatttgtggtttagatacgagtggagtgcgataagggataaattattttcgcgtattttttagcgatggggcgaaagtaacggatttagttttcgggagttgttttcgtcgattttttttgtcgcgatttgattcgcggcgattgcgttgttttttggttgtttttttcgttttcgtaggcgcgcggggttattatttacgcgcgtattgtaggtttttgcgtacgacgttttagatgaagtcgttatagaggtcgtattacgtgtgcgtggcgggtttcgcgggttggaagcggtggttacggttagggattagttgtcgtgtggggttgtacgcggtgtttcgcgcgatgcgtagcgcgttggtacgttttagtcgggtgcggttttttttagcgcgtttagcgggtgttagttttcgtagtttaatgagtttaggttttttcgatatggttcggttgggttcgtgtttcgttggttttgggcgttagtaagcgcgggtcgggcggggttatagggcgggtttcgattttagcgttttttttaggatttagattgggcggcgggaaggagttgaggagagtcgcgtaatggaaatttgggtgtagggattgtggggttcgaaggcggggttgggcgcgttttcgtagagtttttttcgttttgtttttttttttttttttcgttttttttttatattttatttcggacggttataacgacggcgatcgtaaagtattacgcggagatattcgtgtttttggaggttagttttattgtgttagaggaagagggtttttatattcggttttggtttttttggttcggtttgttgaagtaatatatttggtttatttattgggtggggtaggaagtttcgagtttttatttggggtgaggaggagggagatcggttagtagttttatcgttcgttttgttttttattgcggagattggggtttcggtagaggttggatcgtg

SEQ ID NO: 84 - DNA, 4511 bp, Artificial Sequence
  chemically treated genomic DNA (Homo sapiens)
tacggtttagtttttgtcggagttttagttttcgtagtggagagtagagcgggcggtaaagttgttgatcgattttttttttttttattttaagtgaaggttcgagattttttgttttatttagtgggtaggttaagtgtgttgttttagtaaatcggattaggagggttagggtcggatgtggggattttttttttttagtatagtaaagttggtttttagaaatacgggtattttcgcgtggtgttttgcggtcgtcgtcgttgtggtcgttcggggtggggtgtgaggaggggacgaaggagggaaggaagggtaaggcggggggggttttgcgagagcgcgtttagtttcgttttcgggttttatagtttttgtatttaggtttttattgcgcggttttttttagttttttttcgtcgtttagtttggattttgggggaggcgttgaagtcggggttcgttttgtggtttcgttcggttcgcgtttgttagcgtttaaagttagcgaagtacgggtttaatcgggttatgtcgggggagtttgagtttattgagttgcgggagttggtattcgttgggcgcgttgggaagggtcgtattcggttggagcgtgttaacgcgttgcgtatcgcgcggggtatcgcgtgtaattttatacggtagttggtttttggtcgtggttatcgtttttagttcgcggggttcgttacgtatacgtggtgcgatttttgtggcgattttatttggggcgtcgtgcgtaaaggtttgtagtgcgcgcgtgagtagtggtttcgcgcgtttacgagagcggaaggggtagttaaggggtagcgtagtcgtcgcgggttaagtcgcggtagagggggtcggcggggatagttttcgaggattaggttcgttattttcgttttatcgttgaagagtgcgcgaaaatggtttattttttgtcgtattttattcgtatttgggttatagatgagtagaggtggttgtttatatgtaaaaatacgttgattttaagttttttatttttaaaatgttttggttttttttgagaaagggtttgtgtttattgttttcggagtttatttttttaggtttgtttttttttaaatatttatgattttttttagaatttttagggtgaagggaaattattatttatgggagggagtttggaaaaatttagaatttttggtgggttttttgtaagtaggagttttgttgagtttttatttagtaaatatttttttttgatttagtgaattagatgttaaaatatgtacgtagttatatatttagtagtttttttgtatttttgggaatcgttagtaagtaaaggttgtttttttttgggtagatattagttggaattattaggggtgtttttatagtttttttcgttagtttggattttatcgtagatttgttgaattaattgttgggagtggattttaggtattagtaaattttaaaaattttttaaattattgtaatatggagtttgggttgagtattattgttttggtttatttaggaatttgtggatggatagtgttttaggtttgtgtgtgtatggagatttttttattcggtataagaggatattataaatttagttggggggagtataaagttgtgatagaatgtaaagaatgaataaggggtcgagcgcggtggtttatgtttgtaattttagtatttcggaaggcggaggcgggtggattatttgaggttaggagtttaagattagtttggttaatatggtgaaattttatgtttattaaaaaataaaaaaaaatgagttaggcgtagtggcgggtgtttgtaattttagttattcgggaggttgaggtgggagaattgtttgaatataggaggcggaggttgtagtgagtcgagatcgtgttattgttttttagttttggcgatagagtgagattttgttttaaaaaaaaaaaaaaaaaaaaaaagaataaggttgggatattgtagcgtttttaaagagaaataaagtagttatggagataagaagtaggatgatttgggtatgtttattagaggtagagataagggagaaattaaagataagtttgggtttttgtttttagtaattgggagtttagtggttatttttgttgtaaagaggaagttgggtaagtgtagtagtgaggttgaagaaaagggaattaaattttggttatgtttatttgaaacgttttttagatattttagtgaaggtattggtacggaggatttagtttgagggtttaggttagtgttttagtcgtggatttggggtagatgaatgtagatagattaggttagtgattaggattgagtttagattttatcgtgagatatggaagttgagttagaatttgtaaaggagttgagtaggagttgtagggggtaggaggaaaattgggagagtgtagtttttgggagttaaagggagtaagttttaaatgatgttgagggggtgagaatggagaatggaatattggattttatttggtagtatatagatcgttgaggattttgtttcgggtagttttttggaggaagaggtaagtttggttggagtgggtagaggggagagtgaaggcgaaggattagagtgtatagagattagtgttttggtttgaggggagtagagataggtgataattatagggtagacgtaggttaaaggtgtttagttttttttttaagtaaatgggtagatgtattttatatacgtttttagtgaagggtcgggtgcggtggtttaagtttgtagttttagtattttggaaggtcgaggcgggtggattatttgagattaggagtttgagattagtttggttaatatggtgaaatttcgtttttattaaaaatataaaaattagttgggtatggtggcgggcgtttgtaattttaggtatttaggaggttgaggtagaagaatcgtttgaatttaggaggcggaggttgcggtgagtcgaaatcgcgttattgtattttagtttgggtgataaaagtaagacgtagttttttgttgttgtttttttaattgttaatgaggaaaggggaagttttgtgttaggcgatagagatttaattgttgagtaggtttttttgtttgtggtttttcggtcggtttttagacgtttaggtggttaatattagagttcgcgtagtagtgtgaggtaatttattgagataggtcgggtttgcggagtttggcgagtagcggttttttttttggggtttttttttaattttcgggatattttttcgatttggagttttttcgttttatcgttaggtttttttgtagattgtaagtttatttgttattatcgttgtcgcgcgttcgtttgtttggattgttgcgggtttcgggatttgggttgggaattcgcggtggagcgggatacgaacgtggtgagcgcggggtcgagggcgtatgggaagggcgaggatgggtaggttatagtgtaggtattttcgagggttgtttgggtgtcgcgcgtaaggagcgttttaattgtcgatttttcggcggtatagagaggttaattttgcgcgggggttgggaggggagtttggattgtcggtttcgtaagtattttattcgttgtaagcggattcgggtttaggttgatttaggtttcgcgtacgcgtatttttcgtattttttcgttttcgttttcggttagaggttatttttgtgcgtttgttcggacgttggtattcgttttcgttttttgtggtaggtggggtttgtgagtggagtttcggagcgatgaggttatttttgggggcgaagcgtgcgtgttttcgtttcggcgtttttgttttaatgagataagagttagatttcggcgatttacgttttagttttaacggttgcggcgcggttttggttcgggcgtacgcgtatattgatacgcgtatacgtacgtacgcgatcggggcggtggttggcggttacggacgcgtaggattgggggacgggcgggtacggttatgggcgaggcggaggcgttttttttcgaaatgatttggagtagtacgacgagtagtggttattgtagttaagaggattcggattcggagttcgagtagtattttatcgcgcgaatttcgttagttcgtaggtcgcgtcgggattaggtgggagttagggggtgtcggcgggcgggaggggaagcggtcgttggagtttcgtttttttcggttcgttgtcgcgttttgggtcggtgggtagttttatttttttggttacgtggtttttcgcgggttttggtcggggatttgttcgcggaatcgtgcgtaagatttcgattttatcgtttagatgttgggtgtcggggtttttttggtttttgttatagataggttgaatacggaaaaagtagttgtatggtttgtggtagatttgagtcgggtattatttagttatgattaaagtcgatcgagtagtttggattagtatttcgattttcgcgttcgaatgtttt

SEQ ID NO: 85 - DNA, 1775 bp, Artificial Sequence
  chemically treated genomic DNA (Homo sapiens)
atatcgagttacgaaatttagagtaaaagtaaaattttttaatggaatgtttatgtaaatattagaaatataataaaataaggtaaagtttgttttttaaaatgttgtttattatattaaaatataattttgttttttaaatagcgagtaaaattaaattaattttatttttttaaatagaagtttatttaaagtttttttataaaaatgatatttatttgatttaatattgtttttttaataagaataatacgtagggtgttagagggtagttgttggatttttttttagtaaataaaggagattagttagagtttagtttggtttgtttaggaaaggaggaacgtagtttgttgatatggttaaggaatgttaattaatatattttaaaatttttattattttgtttgagacgtgtatatttttttaggtttttaaagtttaattagaaagtgtatttaattttattgttattttatttatagtggggaagtttatcgaggaaaattatagggaaataaaatgttttttagttatttatattagtataattaatttagagtttacggtataaattaaataagttaatttgttagtgttttgaatgaagatatttaattaaagtatgtattttttaattttttagtagtttttaggatagttggttttggtgatcgttttttggttttttattgtttttaatacgattggttttttatcgtaggattttaaataaaatgagataattaaattatatttcgagcgaaggggcgtttattttgtagataaatatatcggttttgttttttttaaaatgcggatacgtgtttttttcgtattagggggggtttttcggcgcgcgtttcgtcgttatttgttgaggaaagcgagcgtattttttgtagtttaggtttcgggcgttagttttgtttcgtagttttagagttcgtcgtagttcgggtggttttttttcggtttagcgttcgtcgtttgtttttcgttttgtaagttttaagaggtagttatttttcgtagttttcgcgtttgtaattgttttttggcgggggagtgggtgtttaaaaagttagtagttggagaaattgaaaagattataagcgatttaacgataagtttttttttttttttaaagatcgagaggagggtagaggggagtagtgtttgagtttacgtgatcgagttagggagttcgacggttttaggaacgttcgacgtcgcgcgtgatttttaagtgggagtattttcgaatcgatttttggtttatttataaggatagtggcgtatagatggcgtttttcgtagttttagttttagatttaagaggtttggagtagggtttgagaatatgtatttttaattaggttttgggggatgtcgatattgatatagttagtttggggattatatttcgaggattacgtttttagtttttgatttatataagtgttatttagaatagatgtttgattttaaggagttagtggtgaaattagagaggttttgggtttgttaaatttttagtagtaaacgtaatttcgggttttggagtggtaaagtcgtggattagaggtggagggagtgggtttttagtttttaagaggttattgggaaggtttttcgcgttagattaaagattttaggtattttttcgaatttatttgaagtggtatcggggagatttgtgttttcggttacggcgttttttttcgttggaggtatttgtttattttttttttcgggcgaaggtttttcgcgtt

SEQ ID NO: 86 - DNA, 1775 bp, Artificial Sequence
  chemically treated genomic DNA (Homo sapiens)
ggcgcgaggggttttcgttcgagaagaggggtgggtaggtgtttttagcggagaagggcgtcgtggtcggaggtataggttttttcggtgttattttaagtgagttcgaggaagtatttgggatttttgatttaacgcgaaaggtttttttagtgattttttgagagttgagaatttattttttttatttttagtttacggttttgttattttagggttcgaggttacgtttgttgttggggatttgataaatttaaagtttttttggttttattattggttttttagaattagatatttgttttgaatgatatttatgtgagttaggggttgaggacgtgattttcgaagtgtggtttttagattggttgtattagtgtcggtattttttaggatttggttggaaatgtatatttttaggttttattttagattttttaaatttgagattggggttgcggggagcgttatttgtgcgttattatttttgtgggtggattaggagtcggttcgagggtgtttttatttagaggttacgcgcggcgtcgggcgtttttgagatcgtcgggttttttggttcggttacgtgggtttaggtattatttttttttatttttttttcggtttttaaaaggaagaaggggtttatcgttaagtcgtttgtgatttttttagtttttttagttgttggttttttggatatttattttttcgttaggaggtagttgtaagcgcggaggttgcgagaaataattgttttttgaaatttgtagggcgaagagtaggcggcgagcgttgggtcggggagggattattcgagttgcgacgggttttggggttgcggggtagggttggcgttcggagtttgagttgtaggaggtgcgttcgttttttttaataggtggcggcggggcgcgcgtcgggagattttttttaatgcgggaaaagtacgtgttcgtattttagagaaggtaaggtcggtgtgtttatttgtaaggtaagcgttttttcgttcgaggtgtggtttaattgttttattttgtttgaaattttgcggtgagaaattagtcgtgttgagaataataaaagattaaaaaacgattattaaaattaattgttttgaaagttattggaaagttggaaaatgtatgttttgattaaatgtttttatttaagatattggtaagttaatttatttagtttgtgtcgtgagttttgggttgattgtgttaatatgaataattgaaaaatattttatttttttatggtttttttcgatggatttttttattatgggtgaaatgataatggagttgaatatattttttgattgaattttgagggtttgggaagatgtatacgttttaggtaagatgataggggttttaaaatgtattaattggtattttttagttatgttagtaagttgcgtttttttttttttgggtagattaagttaagttttaattggttttttttatttgttgaagaggagtttaataattgttttttaatattttgcgtgttatttttattggaaggataatattaagttaagtgaatgttatttttgtgaaaaaattttgagtggatttttatttaggaagataaggttgatttaattttattcgttgtttaaaaagtaggattgtgttttggtgtggtaggtaatattttggaggatagattttgttttattttgttatatttttagtatttatatgggtattttattagaaagttttatttttgttttaagtttcgtaattcggtgt

SEQ ID NO: 87 - DNA, 1223 bp, Artificial Sequence
  chemically treated genomic DNA (Homo sapiens)
tttatgtgttttattcggggttcggagtaaataaaatcgatttaaaaataattttgaatgatagaaagggggtattttttttatttaagggggtgaggtaggttgaagatgggtttttattttttttaagattatggagggcgtcggggtgttattttagttgtgaaaaagggatttaggattcgtagatgttggcgaggaataggggtgcggagtatgagtcggttttgtattacgttttggggtttttagtattgaagcgtttagtattatgtagagtagttgggagcgggtttcgttgggcggggtcgagttgcgcgcgattttcggcgcgttcggggaggtttagataggggtggtttttttggttttcgttttcgcgggttttatgatatcgtattggttcgcgggacggggcggggtcgggtgagggggaggagatagttttacgttttgcgattcgcggtgatttttacgcggaattttttcgcggtaattcgaagtatcgcgtttgcgtgttgtagtagcgtttggtggcggtggtagtttgttcgcgggtgtgtgaagggagatagtgtggaggttatagggtattcgttacgatgagtagtattttagttaagatcgcggagatagaagtagaggtaatggacgtagttggcggtttatttttagtttgagtattttttttttggtggcgtcgtttttttttgtttttttttgagtcgcgttaggatcgggtttagatttcgcgattttttttagcgaggttcgtgtttcgattgttttttgttacgattaggagttttcgattttttttagttagggtttttttttttttcgtttcgcgtttacgttttcggatttttttttgttcgggttcgcgtttcgtatttttgtattttaggtttttagttcgtttttttttttagtgtttggtttttgttttgatgttgttttttttcgttttgttttgagaaatattgaattttgttttttattttatttttgatttggttagatagtttaggatttttttttattatttttcgttgcgttttttttattttttttttttttagtgtttattttaatgattttttgatttagagtatttgttttcggtaatcggatttggaagtaaaatgatatttgtgtgggagtagtttatttcgtttggatagtgtgtgattttattgcgtgcggttttgagagcgttttat

SEQ ID NO: 88 - DNA, 1223 bp, Artificial Sequence
  chemically treated genomic DNA (Homo sapiens)
gtaaagcgtttttagggtcgtacgtaatggaattatatattatttaggcggaataaattgtttttatatagatgttattttatttttagattcgattatcgggagtaaatattttgaattagggggttattagggtagatattgggaaaagggggaataagggggacgtagcgaaggatgatgaggaaagattttgaattatttgattaagttagagatggaataagggataggatttagtgttttttagagtaaaacggaaagaaataatattagaataggagttaaatattgggagggggaacggattaagggtttaaggtgtaggggtgcggaacgcgggttcgggtaaaggggagttcgagagcgtagacgcgggacgaggggaaagggggttttgattgaggagagtcggggatttttaatcgtggtagagggtagtcggaatacgggtttcgttgagagaagtcgcggaatttaggttcggttttgacgcggtttaaaggagaataggaaggagcgacgttattaaagaaggaatgtttagattaagagtgaatcgttagttgcgtttattatttttgtttttattttcgcgattttagttaaggtgttgtttatcgtggcgagtattttgtggtttttatattgtttttttttatatattcgcgggtaaattgttatcgttattaggcgttattgtagtacgtaggcgcggtatttcgaattatcgcgagagagtttcgcgtaggggttatcgcgagtcgtaaagcgtggggttgtttttttttttttattcgatttcgtttcgtttcgcgagttagtgcggtgttatagagttcgcgggagcggaggttagagaggttatttttgtttgggttttttcgagcgcgtcgagggtcgcgcgtagttcggtttcgtttagcgggattcgtttttagttgttttgtatggtattgaacgttttagtgttggagattttagggcgtggtgtaaagtcgatttatgtttcgtatttttgtttttcgttagtatttgcgggttttgggttttttttttatagttggggtgatatttcgacgttttttatggttttggagggagtagagatttatttttagtttgttttatttttttggataaagaaaatgttttttttttattatttaaaattatttttaggtcggttttgtttatttcgaatttcgagtagagtatatggg

SEQ ID NO: 89 - DNA, 2183 bp, Artificial Sequence
  chemically treated genomic DNA (Homo sapiens)
aagggagaaggacgggggcgttgtttggtgattgttcgcgtgatttttttaaggcggcgattattttttgggattcgttttttagtcgcgtcgttcgtattcgggtttcgcgattttttttcgtttttttttcgttttagcgatgttaagacgttgaatcgtagggacgaggttttggggataaagttatttcgcggcgtttttttttgttaagtcgcgggtttttggcggttagaaagcgttttaggtttatttttgcgggttcggttttttttttttatttaaggtttcggggttacgagttttttattttgcgtttttttcgcgttttttttattttaaattttagtagcgtcgttgtttttttcggaaataagttcgttgagtaaaggcggaggaaaattttgggtttttcgttttgattggttttttttcgtcgagcggggcgaggtagcgattggttgtcgggcgttgttagtcgtcgaggttagagttatcgtcggggaagcgtagtcgggttcgggtgtttcggttgtcgtcgcggttgttcggttagtgtagttgggcgagttcgcgcgggcgtcgtcgtcgtttttgttgttgtttatttcgtcgcgtcgtcggcgttgtcggttttgtaggcggtcgtcggggaggggcggtcgagagagcggagtacgaggaggcgggggcggtagagaagtgatgttggcgtcggggatcggggtagcggtagcggagtagtagtattttcgggattttggttgtagcgtttttgtggttcgcgcgttagtttagcggtcggagattacgcgtttcgcgggtaaggttttgttcggtagcgttcgcgacgttttcgggacggttggcgtggtttttgggggttacgaggcgcgtggtggtcggggtatttcgacgaaggtgttgggattcggattgcgtgtttcgacgttgggttgtgttattgttcgcgttcgtgcggttttagttggtgcgttttttttttcgcgtttatagattttgatagcgcggggatggtattgtgtgagtgtggatgtggatgcgtgtgtgcgcgcgcgcggtttggggtattttgtagcgagaatagtgggttttttttgcgtggttcgacgttttttaaggatttaagttgggttggagtgagtaggatgttgttggttcggcgggaggtagaacgtacggagcgtacgggaaagtttatcgtggttcgtaaagagtcgagtaaattgaattttattgcggtgattaaaaggagttgtggatttggcgcgttaggggagaggcgcgttttacgaggttttttaaagttttattttgtttcggggatttcggaggggaagggaagagagggaaaagtaattgttggtttatattgttgaagaaaaggaggaaagagaagttgggggtgggggtgggggtggaggttatttttgggggagtggcgatttttaggtgtttgaagtttcgcgtgggaggtttgttatatttttttggagcgtagatttgaggatggagagttttattttgaggtattggtagcggttttttttgtttggtggcggcgtagggcgtagcgggatagtttggtggaggtagagcggggtttcgacgttcgacggttcggcgtttaggtggggttattgtttttttaggtcgttttggttcgttgattttttaggttgagattcggtttggtgcgtttttggtagttgttaaatgtttggcggtttcgtttttcgataaagtttaggttcgttggggtttggtttattagatttaggatacgttaattacgtagagtaattaggttagggtatttagttgtttttagagcgtttttgttttatattagattattttatttgataaagttgttgagagttttattcgtgttgtaaagtttttcgtagaaggcgaattttttgcgttgttgtaaatggatggtgttattgggttagattcgaattttcgtagtttagtgtagtgggttttttatttttgtttaggacgtataaatttatttttggcgattgttttttatgtggttttttgttttcgtgggagtatttgtttaggaaagtttttgaaatattttaatattaaggagttttttttattgttttagatggggcgaggtttcggtatttgattggcgttggggt

SEQ ID NO: 90 - DNA, 2183 bp, Artificial Sequence
  chemically treated genomic DNA (Homo sapiens)
attttaacgttagttaagtatcggagtttcgttttatttgagatagtggggagagttttttagtattgaggtattttaagaatttttttaagtagatatttttacggagataaggagttatatagaaaataatcgttaagagtaagtttgtgcgttttgagtagggatggagaatttattgtattgaattacggagattcggatttggtttagtagtattatttatttgtagtagcgtaaagaattcgttttttgcggaaggttttgtagtacgggtggaatttttaatagttttattaaataagataatttaatatgaaataaaaacgttttggaggtagttgggtattttaatttggttattttgcgtggttaacgtgttttaggtttgatggattagattttagcgggtttgaattttgtcggaaagcggagtcgttaggtatttggtagttgttagaggcgtattaggtcgggttttaatttgggaggttagcgggttaaagcggtttggggaggtagtggttttatttggacgtcgggtcgtcgggcgtcggagtttcgttttgtttttattaagttgtttcgttgcgttttacgtcgttattaggtaggaggagtcgttattagtattttagagtgggattttttatttttaagtttgcgttttagaaaagtgtagtaagttttttacgcggggttttagatatttaaaagtcgttatttttttaagagtaatttttatttttatttttatttttaattttttttttttttttttttttagtaatgtggattaatagttatttttttttttttttttttttttttcgaagttttcggggtaaagtgggattttggggagtttcgtggaacgcgttttttttttggcgcgttaggtttatagttttttttaattatcgtaataaagtttaatttgttcggttttttacgagttacggtggattttttcgtgcgtttcgtgcgttttatttttcgtcgagttaatagtattttatttattttagtttagtttgggtttttgaaggacgtcgggttacgtagaggggatttattgttttcgttgtaaagtgttttaagtcgcgcgcgcgtatatacgtatttatatttatatttatataatgttattttcgcgttgttaaagtttgtgagcgcggaagggagaacgtattagttggagtcgtacgggcgcgggtagtagtatagtttagcgtcgggatacgtagttcgggttttaatattttcgtcgggatgtttcggttattacgcgtttcgtaatttttaaagattacgttagtcgtttcgggggcgtcgcgggcgttgtcggatagaattttattcgcggggcgcgtggttttcggtcgttgggttggcgcgcgggttatagggacgttgtagttagggtttcgaagatgttgttgtttcgttgtcgttgtttcgattttcggcgttagtattatttttttgtcgttttcgttttttcgtgtttcgttttttcggtcgttttttttcggcggtcgtttgtaagatcggtagcgtcggcggcgcggcggggtgggtagtagtagaggcggcggcggcgttcgcgcgagttcgtttagttgtattagtcgagtagtcgcggcggtagtcgaagtattcgagttcggttgcgttttttcggcgatggttttggtttcggcgattgataacgttcggtagttaatcgttgtttcgtttcgttcggcggggggagattaattagagcggaaggtttaaggttttttttcgtttttgtttagcgggtttgttttcgggagaggtagcgacgttgttggggtttgggatgggggaggcgcgggaggggcgtaggatgggggattcgtggtttcggagttttaggtgaggagggaaagtcgggttcgtaggggtgggtttggggcgttttttgatcgttaggagttcgcggtttggtaggaaagggcgtcgcggggtgattttgtttttagagtttcgtttttgcggtttagcgttttggtatcgttggggcgaggggggagcggggaggggtcgcgggattcgagtacgaacggcgcggttggagagcgaattttaggaggtggtcgtcgttttgaaggaattacgcgaatagttattagatagcgttttcgtttttttttttt

SEQ ID NO: 91 - DNA, 8030 bp, Artificial Sequence
  chemically treated genomic DNA (Homo sapiens)
tttgcgtaattttagttagtttgaattttcggaggtaaatagagcgtaatttgttttggaagaattttgttacgtttaaggttttatgtcgggtgttggtttttttgtttttaattatttttttatttcgattcggattgtagaaatttttaattttttgttttttagttttatttttatttttagatttggggttgttaaataacggaaattttaggaagacgtaggtgcggtttttaaagttttggtttgtgagcgtttttaggttggtcggggcgttggtttttttagaaataaggtttgaatatgtaggtgttagttaggattttttgtcgtttgtttatcgtcgtttttttttcgggatttgagagaagcgggagtgtgtgtgtgtgtgtgtgtgtgtgtgtgtgcgcgtgtgtgtgtttcgtgttaggagaaaggttcgtggttgtcgttttagttggtttgtttattttttgtttttaggagaagtttgtttatttgggatattagcgattttttttatttttattttatcggttttatattttttttatttttttttaagtcgttgatgtagaaagtatttggttattttgaaacggtagttttcggaattttagttttgttttgtaatttagtagggtttttcggaagttttataattgagatttatgggtttatcgggtaattaaatgatgttattgtgttaattttgtatgtattattgttgttcgcgtcgttcgtgggtcgtcggtcggtcgtagttcgttggcgacgagggtattatagttgttttgatcgcgtagattatgtatgtttcggtttcgggaatttattatgtattagaatatattagcgtttgtattttaaaaggttaaattattggtttttagttagggattttcggtaagtggtttgttagtgacgagtgtttgtttatattggtatatagcggagttttttgttttcggtttattcgtttttaggaaagttttggggtgaggcgaaggcgattgaagtaatgtttttttttttagatcgtagttgtttaggggggatatagtacggtattttttatcgaatttttttcgttcgttcgtattttagtttttttttttttagcgatttttttatttttttttttttttttttttttgacgtttgattttagtagtaaaggaggtaaaaaaggtatcgagtcgttagttaaatttgaaaagtgcggtttcgttttttttatagttattggtagtttttcgtggaaggttcgtttttcggggtagttgcggtttcggagtggttgcgtttggcgttcgtcgggcgtggtttcgttttaggttcgggagggtaggttggttgtttcggcgagcggtagagtttttttggatagttttcgtttatttaaatagaagacgtcggcgtcggagcgggttcggatatggcgaggttgcgagtcggttcgagcggcggggttcggtgattttttttttttttttcgtttttttttttttttcgtacgtacgtttcgttcgtttttatttcgtttttatttcgggcgagttcgttcgtagttcggggcgtatattcgtacgcgtatttttttttatttattttcgcgttcgtttttattttcgtagtcgagtttcgttacgcgcgttttgttcgttcgtcggtcgttttcgtcgttttcgtcgttttcgggttttgatggattgaatgaaggttgtttatatcgtttatcgatgttttattaaagatttagaaggttgcgttatgaattcggagttgataatggaaagtttgggtattttgtacgggtcggtcggcggcggtagtggcgggggcggcggcgggggcggcgggggcggcggcgggggttcgggttatgagtaggagttgttggttagttttagtttttattacgcgggtcgcggcgtcgttggttcgttgcggggtttttcgtcgtttttaatcgcgtattaggagttgggtacggcggtagcggcggtagcggcggcgtcgcgttcggttatggttattagtatggtttcgattttggacggcggcgattatcggttcgagttttttatttcgttgtattacgttatgagtatgttttgcgattcgttttcgtttggtatgggtatgagtaatatttatattacgttgatatcgttttagtcgttgttatttatttttatcgtgtttgataagttttattatttttattcgtattattattcgtattattattattattattattattagcgtttgttcggtaacgttagcggtagttttatttttatgcgcgacgagcgcgggttttcggttatgaataatttttatagtttttataaggagatgttcggtatgagttagagtttgttttcgttggtcgttacgtcgttgggtaacgggttaggcggtttttataacgcgtagtagagtttgtttaattacggttcgtcgggttacgataaaatgtttagttttaatttcgacgcgtattatattgttatgttgattcgcggtgagtaatatttgtttcgcggtttgggtattttatttgcggttatgatgtcgtatttgaacggtttgtattattcgggttatatttagttttacgggtcggtgttggtatttagtcgcgagcggttattttcgtttttatcgggttcgtaggtggttacgtcgggttagttggaagaaattaatattaaagaggtggtttagcgtattatagcggagttgaagcgttatagtattttttaggcgatttttgcgtagagggtgttgtgtcggttttaggggatttttttcgatttgtttcggaatttaaaatcgtggagtaaatttaaatttggtagggagatttttcgtaggatgtggaagtggttttaggagttcgagttttagcgtatgttcgttttacgtttggtaggtaaggtcggggttagttaggggttaggttgttgggaagagggtttcgggttcggtgtttgtggtttaagtttgcgcgtcgagttattttttttgatttttttttttttttttttatatacgtttttttttttttcgtttttatttttttttttattttttttttttttttcgttttttttttatttttttttttttttttttttttttttttttattttttttttgtttttgagtttttattgatcgatttttttttattttattcgttttttttttaatgtgttaatttttgttttattttcgatttttttaggtattgggaggcgggatgggggtgtgcgtttttttttaggagttttgtttttttaagatttatagaaattaggatttgtttttatttaaaattttatgtattttaagttttttttagataatatattttaatttttcgggttgattagtttttttgtgtagaggtagttgagaggttttgttttgtagagggaaaagagttttttatttttttatttattatataggtaaatttatttggttattggttgaaggtatagttttgttttcgcggggaatcggcggttaggatataatagcgtttttggagtttatttttggttttggcgttggcgtagggattttttgatcgggtttgaggggttcgggttagttttaatgttattatttatagcgagggtagggtgtaaggttgagaaggttatatttatcgttttgggaggacgtgggagaagagattgaggtggaaagcgttttgttttgtttatcggtcgtttttgtttcggttttagcgtttgttgggatttgttaggatttgtcggggtttcgggagattttgagtattcgtaggaagaggtgttgagaaattaaaaatttaggttagttaatgtatttttgtcgtcggttgtaggtttcgtttttgtattaagcgggcgttgattgtgcgcgtttggcgatcgcggggaggattggcggttcgcgggaggggacgggtagaggcgcgggttatattgttttggagtcggttcggttttttgtgttttttttagcggttaagttgcgaggtatagttttttattgttttaggagtatagaaattttttgtgtgggcggcgggtgcgcgagttagagggaaagatgtagtagttattgcgattggtacgtagttgcgcgtttttgtgcgtacggatttcgcgcggtgtgcgtggcgattgcgttgtttttaggagtaagttacgggtttagaggggtaaaatgtttaggtttttcgttgggaaggatatattatattttatggtaagttagggtgggcgattttttatggatcgggtggaggggggtattttttaggatcggcgggcggtttaggggaataattcgtggtggcgatgatttgtatagcgcgggttttgggatgcgcgcggtttcgagttagtttcgtatagttcgttttcggagttgcgagtttaggtttttattttcgatttttcgggtttttttcgtatcgttgagtttagtttgtggggtgtattcgattaacgttcgatagggttggggaatgtgataggtagtaggtttattcgggtttggggagggggagttttcgttttgatagtatttttttttgtcgtttgttggtggatttttatttttagtcggtaatcgtttcgtagtgttgatttaagaaggtaaagaaaattaggtttttttgtaaagagttttttttaaatcggcggatttcggatattttgagtggatttagaaatttatgtaattttttttttttagtttattttttatttttttttatagttttttttgatttgttgttggttcggggtaagataaagtagttagtagagagcgataataatagcggcgggaaatgaattggagattggttgatagtttttaatattttgttatagattttttcgaatgttttaggttgtttttggtgggttttagtattcgtcggttttttgggtatcggggattagaaggaatttggtagttggttttaggggtatagttaaaggtaggatgatagttatttttttgtttattttagagcgttgtcgtttttttatgtcggtcgcgtaaagaatatagtttttaaaaaatacgtgttttttgtttatataggtttgaaagtgatgaggaaagtaatgtttcgtttattagcgagttttagtttttaaaatgattttaagcgttgttgagatgagaaagcgtggtatttcgggggtttttagttttattcgcgtttatggtgtaagtttgtagggataggttcgggatagtattgtttacgttgttagatttttcgtagaggatcgttgaagttgttttcgtgggagatagaatgttttttttagcgagtggaaaaggtttgttgaggatttcgttttgttcgagtatttaaatgtgtgtttgttttattattttgggttgaaaagggataagagttttagtttttttatttggttattttattagtaattataagtgtgttgagtggttattattatataggaggttttttagtttggggttagtagattagtttttttagatattgatgtagaagttgggattggtaagtaggtattatgtgttcggagcgttaggggataggagtaaatggagaagaaaagcggaggtttttttcgttcggagtatcgatcggaattttcgtcggtacgtcgtagagggttttcgtcgttgggtttcgggggtttaataagtttagtcgtttcgtaggcggttcggtcggatttttagatcggtgtttggaagatatcgtttttgtttttttttcgttaaatttgtttttttttttttttttataggttataggtttttttttttttttattttggtttcgttttcgggttttgttaaatagttaagtaggtcggggtttagggggtttagaatgaagaggtttgatttggttagcgtcggtaaagtttatttttaggcgaggttataatagaggtaggttttttttgtttagtttgtcggtgtagttatagttaagggtggtatttgaaaggaaaagggagaaaatttcggagaaatttagattgttttaacgttagattttagagaaattgattttaaatgtacggattcgttcggaaagggcggttaagtggtaggtggttgtaatttcgttcggtcgggttttcgtagaggttttttaagattagtttttgtagggcggtttttagtaatttgataagaggcggttaagataaatttttgcgggttcgagtatatattttcgggcgttgggttttagagatttttaaattaagtataaataagaagggagtgagagaatttaggttagaatttgtacgggtattttattgaggaaaagcgaggtttcggtggtaggtatgttttttttcgacgttcgaaaatcgagtcgagcgttcgattatatttattgtagaggttttcgtttttagtgagttcggattttttagcggtttgttcggagttggtttttagttttcgtcgtagttcgacgtacggtttttttttggtagtaagtttttagcggttagtttgaagttaattttgtttaggcggtcgagggtttttagttaatttattatgatgtcgtttgggttatttgatgttcgtagcggcgggatacggttcgggtagtgcgtagtggtttttgttaggggtatcgcgtgcgtgtttgtttttcgttgcgtcggggacgtttttgggtgatacgggtcgttgggtattttttaagtcgaggaaacggatttttttcgtagagtttcgcgtttattttttaattttttatttcgtttttcgttgttagggttttcgatttagtttattttttttggcggtttagttagggattagagttggagaggttgaacgtaattcgtgttagtacggaatagacgatatgtttgtttgttagttgtttggatgaataattgaaaagttcgttgtagtttgtgtttcgttaagtttcgggtgtcgggagaatatttttttaatacgtattagggtgggcgggagcgggtagaggaggcgggattcgagggaggagagtgaattcgagtaggagaagtagtttaggtagttaggcgttttcgatgcgagaggttgggtatttatttttattttaggttttttattgtgtggttatgttatttttttaaataaatgtgtatatggagggagatcgatgttgataatgtttagaagattaaaagagtattaatgttggtaataataacgtaaacgtgtggatttagattttattgatttggaatttgattcggcgcgtttttagtaagttcgacggcgcgttttttttagtagagcgtttattagcgttacggtttcgcggttttttagcggtgtcgtttcgttagttttgcgcgggttttttcgtttgatcgtagtttttttttcgcgaggttttagttcgttttattttttcgaggttttttttttttttcgcggggttttttgttttttgtattttttttttcgatttttgtattattcgtttttgtgcgtatatatcgttatttgcgttttcggcgattcgtttgggcggttgggttcgcgaagttaatgcgttgaacggtgttcgagtttttttaattattttgtgtttggtcgttgttattgggttttggtgattaagtttaagtttgaaaatgacgtggttaaagttgtttgttaacggtagagtttaattagtcgtagatttttttttatttttatcggttttcgtattaaaaaggtttacgcgtagattttttacgtaggtgtattcgttggataattaaacgtggttttagtaataaaagtttgagttttattttttcgagtagtaggttttgcgttggattggtcgggtttaatagggagaattttgtgttttattttggttgggataggaagtaagagaagtaaattggggaatttttgttttatttttttttattttttggacgttttgggtcgaggttcgggttattggtttatcgcgggta

SEQ ID NO: 92 - DNA, 8030 bp, Artificial Sequence
  chemically treated genomic DNA (Homo sapiens)
tattcgcgatgggttagtgattcgggtttcggtttaggacgtttagggggtgggaaggggtggggtaggggttttttagtttgttttttttattttttgttttagttaaggtaggatataagattttttttgttagattcgattagtttagcgtagagtttgttattcggagggatgaagtttaggtttttgttattagggttacgtttaattgtttaacgaatgtatttgcgtaaaaagtttgcgcgtgagtttttttagtacgagaatcgatgaggataggaggggatttgcggttgattaagttttgtcgttagtaggtagttttagttacgttatttttaaatttgggtttagttattagggtttagtggtaacggttaagtataggatagttaggaagattcgggtatcgtttagcgtattggtttcgcggatttagtcgtttaggcggatcgtcggaagcgtaagtagcggtgtgtgcgtataggggcgggtggtgtagaggtcgggggagggggtgtagagggtagagagtttcgcgagaggaggagaaaatttcggggaagtaaggcgggttggggtttcgcgggggaggagttgcggttagacgggagaattcgcgtagagttggcgaagcggtatcgttggaaaatcgcggggtcgtggcgttggtgagcgttttgttgggaagagcgcgtcgtcgggtttattggaaacgcgtcggattaagttttagattaatgaaatttgggtttatacgtttacgttattgttgttagtattaatgtttttttaattttttaaatattattagtatcgatttttttttatatatatatttgtttgagaaagtgatataattatatagtggaaagtttggaataaaaataaatgtttagtttttcgtatcgagggcgtttggttgtttgggttgttttttttgttcgggtttatttttttttttcgggtttcgttttttttgttcgttttcgtttattttgatgcgtgttgggaaggtgttttttcggtattcgggatttgacgaagtatagattgtagcgaattttttaattatttatttaagtagttagtaggtaaatatatcgtttgtttcgtattggtacgggttgcgtttagtttttttagttttgatttttaattaaatcgttaggagaggtgggttgagtcgggagttttagtagcgagaaacgaggtgggaggttggggggtgggcgcgagattttgcgaagggggttcgttttttcggtttgggaggtgtttagcggttcgtgttatttaaggacgttttcggcgtagcgggagataagtacgtacgcggtgtttttagtaggagttattgcgtattgttcgggtcgtgtttcgtcgttgcgggtattaggtggtttaggcgatattatggtgggttggttaagggttttcggtcgtttgaatagaattggttttagattggtcgttgggagtttgttgttaggagagggtcgtgcgtcggattacggcggggattggagattagtttcgggtaggtcgttgggggattcgggtttattggaggcggaaatttttgtagtaaatgtagtcgggcgttcggttcgattttcgggcgtcggaagaaaatatgtttgttatcgaggtttcgtttttttttagtgggatgttcgtgtaagttttagtttgggtttttttattttttttttgtttgtgtttggtttagaggtttttggggtttaacgttcgagagtgtgtgttcgaattcgtagaaatttgttttggtcgttttttgttaggttgttgaaaatcgttttgtaagggttggttttggggaatttttgcgaaggttcgatcgggcggggttgtaattatttgttatttagtcgtttttttcgaacgaattcgtgtatttggagttaatttttttgaaatttaacgttggggtaatttaaattttttcgaagtttttttttttttttttttaagtgttatttttggttgtgattatatcggtaggttgggtaggaaggatttgtttttgttgtgatttcgtttaagggtgagttttgtcggcgttggttaaattagatttttttattttgagttttttaaatttcggtttgtttggttgtttggtaggattcgggggcggggttaaaatgagagagaaagggaatttataatttatgagagaaagagaagaggtaggtttggcgggaggggggtagggacggtgttttttaggtatcggtttgagagttcggtcgagtcgtttgcggagcggttgggtttgttaaattttcggggtttaacggcgagggttttttgcggcgtatcggcggggatttcgatcgatatttcgggcggagaaagttttcgttttttttttttatttgtttttgttttttagcgtttcgagtatataatatttatttattagttttagtttttgtattagtgtttgaagagattgatttattgattttaaattgaaaagttttttatgtaataataattatttaatatatttgtagttgttgataaaatggttagataaaaaggttaaagtttttgtttttttttaatttagggtaataaaatagatatatatttgaatgttcgagtaaagcggggtttttagtaggttttttttattcgttggaggaggtattttgttttttacgaaggtagttttagcgattttttgcggaaaatttagtagcgtgggtagtgttgtttcgggtttgtttttgtagatttgtattatgggcgcgggtggggttgaggattttcgggatgttacgtttttttattttagtaacgtttgggattattttaaaagttgaaattcgttaataggcgaagtattattttttttattatttttagatttatatgggtagaaggtacgtgttttttaaaagttgtgttttttgcgcgatcggtatgagggggcggtagcgttttgagatgagtaggagaatagttgttattttgtttttaattgtatttttaagattagttgttaagttttttttggttttcggtgtttaagaagtcggcgggtattaaaatttattagagatagtttgggatattcggggggatttatgataaaatgttaagaattgttagttagtttttagtttatttttcgtcgttattattatcgttttttattggttgttttattttgtttcgaattaatagtaaattagagaaaattgtaggagaggatgaaaaataaattaaaggagaaagattatataaatttttaaatttatttaaagtattcggagttcgtcgatttgggggaggttttttgtagggaaatttagttttttttatttttttagattaatattgcggggcgattatcgattgggaataggaatttattagtagacggtaaaggaaaatgttgttaaagcggaaattttttttttttaagttcgggtgaatttgttgtttgttatattttttagttttgtcgggcgttggtcgagtgtattttataagttgggtttagcggtgcgaggaaagttcgggggatcgggggtggaaatttgagttcgtagtttcggaagcgagttgtgcgaggttggttcggaatcgcgcgtattttaagattcgcgttatgtaaattatcgttattacgaattgtttttttagatcgttcgtcgattttgaaagatatttttttttattcgatttatgggaagtcgtttattttggtttgttatagggtatagtgtgttttttttagcgggggatttggatattttgtttttttgggttcgtggtttgtttttaggggtagcgtagtcgttacgtatatcgcgcggggttcgtgcgtataaaagcgcgtaattgcgtgttagtcgtagtaattattgtatttttttttttagttcgcgtattcgtcgtttatataggaggtttttgtgtttttagaataatagagggttgtatttcgtagtttggtcgttagaggaggtataaagagtcgagtcggttttagaataatgtaattcgcgtttttattcgttttttttcgcgggtcgttagtttttttcgcggtcgttaggcgcgtataattagcgttcgtttaatgtaaaggcggagtttgtagtcggcggtagggatgtattaattaatttgaatttttaattttttagtatttttttttgcgagtgtttagggtttttcggagtttcggtaaattttggtaaattttagtaaacgttgggatcggggtaaggacggtcggtgagtaaggtaaagcgttttttattttagtttttttttttacgtttttttaaagcggtgaatgtgatttttttaattttatattttgttttcgttgtaggtagtgatattggagttggttcgagttttttaagttcggttagaaagtttttgcgttaacgttaaggttagagatgggttttaggagcgttgttgtattttggtcgtcggtttttcgcgggggtaaggttgtgtttttagttaatgattaaataagtttgtttatatggtgggtgggagagtagagagtttttttttttttgtagagtaaagttttttaattgtttttgtatagggagattagttagttcggaaaattgaaatgtgttgtttaaaagagatttgaagtgtatggggttttgaataagggtaggttttggtttttgtgggttttggaaagatagggtttttagaggaaaacgtatatttttatttcgttttttagtatttgggaagatcggaaatagggtaaaggttggtatattgaggggagggcgaatgaaatgggggggggtcggttaatgaaagtttagggataaggagagagtaagaaagaaaaagaaaagggagaagggaaagtaggggaagagcggaagagaaagagaaaatggaagaagaaataaaaacgagaagaaagaggacgtgtataggaaagagaaggaaagaattaagagaagtgattcggcgcgtagatttgggttataagtatcggattcggagttttttttttagtagtttggtttttggttagtttcggttttatttgttaggcgtaaggcggatatgcgttggaattcgggtttttgaagttatttttatattttgcggaaggtttttttgttagatttgagtttattttacggttttggatttcggagtaggtcggagagagttttttgagatcggtatagtattttttgcgtaaagatcgtttgggggatattgtagcgttttagtttcgttgtgatgcgttgggttatttttttggtgttgattttttttagttggttcgacgtggttatttgcgagttcgatgaggacgagggtggtcgttcgcgattgggtgttagtatcggttcgtgagattgagtgtggttcgggtggtgtaggtcgtttaggtgcgatattatggtcgtaggtggggtgtttaggtcgcgggataggtgttgtttatcgcgggttagtatggtagtgtggtgcgcgtcgaagttggggttgagtattttgtcgtggttcggcggatcgtagttgggtagattttgttgcgcgttgtggaggtcgtttagttcgttgtttagcggcgtggcggttagcggggataggttttggtttatgtcgggtatttttttgtagggattgtagaggttgtttatggtcgggagttcgcgttcgtcgcgtatgagggtgaagttgtcgttgacgttgtcggataggcgttggtggtggtggtggtggtggtggtgcggatggtggtgcgggtgagggtggtggaatttgttagatacggtggagatgggtggtagcggttggagcggtgttagcgtggtgtaggtgttgtttatgtttatgttaggcggagacgagtcgtaggatatgtttatggcgtggtgtagcgggatggagagttcgggtcggtagtcgtcgtcgtttaggatcgaggttatgttggtgattatggtcgagcgcgacgtcgtcgttgtcgtcgttgtcgtcgtgtttagtttttggtgcgcggttggaggcggcggagggtttcgtagcgagttagcggcgtcgcggttcgcgtggtgggggttggggttggttagtagtttttgtttatggttcgggttttcgtcgtcgttttcgtcgttttcgtcgtcgttttcgttattgtcgtcgtcggtcggttcgtgtaaagtgtttagattttttattgttagtttcgggtttatggcgtagttttttaggtttttggtgaggtatcgataggcggtgtaggtagtttttatttagtttattagggttcgggggcggcgggggcggcgggggcggtcggcgggcgggtaaggcgcgcgtggcggggttcggttgcgggagtgggggcgggcgcgggagtgagtggagaggagtgcgcgtgcgggtgtgcgtttcgggttgcgggcgggttcgttcggggtgggggcggggtgggggcggacggggcgtgcgtgcgggagaggggaggggacggggagggagggagggattatcgggtttcgtcgttcgggtcggttcgtagtttcgttatgttcgagttcgtttcggcgtcgacgttttttgtttgggtgagcgggagttgtttagaagggttttgtcgttcgtcggggtagttaatttattttttcggatttggggcggggttacgttcgacgggcgttaagcgtaattatttcgaggtcgtagttgtttcgggaggcgggttttttacgggaagttattagtggttgtggagggggcggggtcgtattttttaggtttggttgacggttcggtgttttttttattttttttgttattggaattaaacgttaaggagagggagggaggagaaggtgggggggtcgttggggagagggaggttggagtgcgagcgagcgagagagattcggtgaaagatgtcgtgttgtgttttttttgagtagttgcgatttgggggaaggggtattgttttaatcgttttcgttttattttaaagtttttttggaggcgagtaagtcgggagtaaaagatttcgttatgtgttagtatagataaatattcgttattaataagttatttatcgagagtttttagttgggagttaatagtttagttttttaaaatgtaggcgttaatgtattttaatgtatggtaaattttcgaggtcgggatatgtataatttacgcggttagagtaattgtagtgttttcgtcgttagcgagttgcggtcggtcggcggtttacgggcggcgcgggtagtagtaatgtatgtaaagttaatataataatattatttaattattcggtgagtttataaattttagttatgaggttttcgaagagttttgttagattgtaaaataaaattagaatttcgggagttgtcgttttaaggtgattaagtgttttttgtattagcgatttggaaagaagtggggagagtgtagaatcggtgaggtggaggtgaggagggtcgttggtgttttaagtgagtaaattttttttgggggtagagagtaagtaaattagttgagacggtaattacggattttttttttaatacgagatatatatacgcgtatatatatatatatatatatatatatatattttcgttttttttaaatttcgggagagaaacggcggtgggtagacgataaggaattttggttgatatttgtatatttaaattttgtttttgaaaagattagcgtttcggttagtttgagaacgtttataagttaaggttttaaaaatcgtatttacgtttttttagaattttcgttgtttggtaattttaggtttggaggtgggagtggaattgggggatagagagttggagatttttgtagttcgagtcggggtggaggggtagttgaagatagagaggttaatattcggtataaagttttaaacgtaataagatttttttaaagtaggttgcgttttgtttgttttcgaagatttaagttagttgaggttgcgtaga

SEQ ID NO: 93 - DNA, 2225 bp, Artificial Sequence
  chemically treated genomic DNA (Homo sapiens)
tatttgggtgtaggcgggttgagttcgaaaagagagttagcgaagggagataggggtggggtcgttttataggatttgggaaggtaatggaaaattatagttaaagggggttgttttttggtgggtaggggtgaattttataaagtatatttttaagggtggggagaattataaataatttttttaagggtggggaagattataaagtatattgattagttagggtggggtaggaataaattataatggtggaatgttattagttaaggttgtttttattttttttgtggatttttagttattttaggttatttggatgtatatttgtaagttataggggatgcgatggtttggtttgggatgcgatggtttggtttgataattattatttatgttatgtttattattttaagttttattattattattttatttattttattttattttttttttatatattcgtttttattttggagaggttagatgagttagattttagggaggtttagaagtgggtaaggggaaacgggaaaggaggaagatggtatgggtgtgtttggttaggggtgggagtgttggacggagttcgggataagaggggttttgtagttattggtatataatgtttgggagtttttgttggtgttgggattattttagtgagttttgggagggaattgaagatttttaattattaatgtatttgtttttaaaatcgacggggggaaggatatgtttaggtttaaggatacgtgtaggtttggatgatttcgggttattagggagttttcggagtattttgatttttagacgggtttgatgaaacgagtatttgatttagtaggtttgggttcgggttcgagaatttgcgtttttcgcgagttttcgcgaggtaagtgttgtaggtgcggggttaggagttaggtttcgtttttgcgttcggagtcgtttttagtatagggtttgtgagttttattttttcgcggcgcggggcggggttgggcgcggggtgaaagaggcgaagcgagagcggaggtcgtattttagtattgcgtagggatcggtgagtgtcgtttttgggggtagcgtttagtaatcgcgttaggagcgcggagaagggtattgggagagcggcgttcgtggcggagattagcgtttcggagtacgggtacgacgggggtattttttcggttgttagtaattaataataataataattataattatagtaagggcgttgatgggcgggttcggagtacgtttgattttggtttttattaggttgtttaggtttttgatgacgtattagaaatatttttttaattcgcggtttttttgtaggagaggttgggaaggggtgggggacggggttcgggggaggttttcgagggattttagtaagcggggaagggcgtcgggaaagttttagatttacggttgcgcgggttacgagtttattcgaacgtcgattattgtttttcgtcgatttttattttttgggaacgcgcgaaagtaaatttaagttagattgcggaggtcgttggggagggaaggtttaaggagttttcgtcgattttgttgaataaagggggtttcgagttgggtcgagatggggtatgcgcgggaagatttttgttcgttgtttttttttatcgttttagtggatgttatgtttggggttttttcggcgcgtggggttgacgtattttcggggtttatcgtagttggtcgggatcgtggagtgggtgcggtggacgaagggaggtaggatagtttcgggggtggtagaaggagttcgggtatagttgagatttgcgtttttattttattaatatttatagtaggtgttgtcgagttgggtaattgggatggtttaagttatttggttaaattttaaattacgtttgttattgggaagtagagtttagtgatgttaatcgcgtttttatttttattatcggtgttagttttaaagggtttttaaaatggttgtgttattttttagttttggatcgtagttgtcggttaggaattttagtgttacggtggatacgtttttttcgcgtttttgtcgtttatttgtttatttagtttaggggttttggtaggtagtagtgtatttggtttaaagggtaagatgtttttttttttatttataataaatttaaatattagtagggtttggggggaaaaacgtttttagaagaaaaggtgaatgttag

SEQ ID NO: 94 - DNA, 2225 bp, Artificial Sequence
  chemically treated genomic DNA (Homo sapiens)
ttgatatttatttttttttttgaaagcgtttttttttttaaattttgttggtatttaaatttgttatgaataaaagagagaatattttgttttttagattaaatgtattgttatttattaaagtttttgagttgggtgagtaggtgggcggtaagggcgcgagggaggcgtgtttatcgtgatattgggatttttggtcggtaattgcggtttaaggttgaaagatgatatagttattttaggagttttttgggattgatatcggtggtggaggtagaggcgcggttagtattattggattttattttttagtaataaacgtgatttaaaatttaattaaataatttgggttattttaattgtttagttcggtagtatttgttgtgagtgttggtgggatgggagcgtaggttttagttgtgttcgggttttttttgttattttcgggattgttttgttttttttcgtttatcgtatttattttacgatttcggttaattacgatggatttcgagggtgcgttagttttacgcgtcggggaggttttaggtatggtatttattggggcggtgggggggaatagcgggtaggggttttttcgcgtatgttttatttcggtttagttcggaattttttttatttagtaggatcggcgagaattttttgaattttttttttttagcgattttcgtagtttgatttgggtttgttttcgcgcgtttttaggaaatagaagtcgacggaaagtagtggtcggcgttcgggtgggttcgtggttcgcgtagtcgtggatttgaaattttttcggcgttttttttcgtttattagagtttttcggagatttttttcgagtttcgttttttatttttttttaattttttttgtaggaaggtcgcgggttagggggatgtttttgatgcgttattaggagtttgggtagtttggtgggaattagaattaggcgtgtttcgagttcgtttattagcgtttttgttatgattatgattattattattgttagttattagtagtcgagaaggtgttttcgtcgtgttcgtgtttcggagcgttagttttcgttacgaacgtcgtttttttaatgttttttttcgcgtttttagcgcggttattgggcgttgtttttagaagcgatatttatcggtttttgcgtagtgttggagtgcggttttcgttttcgtttcgttttttttatttcgcgtttagtttcgtttcgcgtcgcgaagaaatgaaatttatagattttgtgttgagggcggtttcgggcgtagaaacgaaatttagtttttggtttcgtatttgtagtatttgtttcgcgggaattcgcgggagacgtaggttttcgggttcgaatttaggtttgttgaattagatgttcgttttattaggttcgtttgaggattaaggtgtttcggaggttttttaatggttcggagttatttaagtttgtacgtatttttgaatttaggtatgttttttttttcgtcggttttgaaaatagatgtattggtaattgggggtttttagtttttttttagggtttattgggatgattttagtattagtagggatttttaggtattgtgtgttaatggttgtagagttttttttgtttcgaatttcgtttagtatttttatttttaattaggtatatttatattattttttttttttttcgtttttttttgtttatttttaggtttttttggagtttggtttatttggtttttttagggtggaaacgggtgtgtggaaggaaaataaaataaaataaataaaatagtaataataaagtttaaaataataaatataatataggtaatagttgttaggttaggttatcgtattttaggttaggttatcgtattttttgtgatttgtaggtatatatttagatggtttaaagtaattgaagatttataaaagaagtaaaaatagttttaattgatgatattttattattgtgatttgtttttgttttattttaattgattaatgtattttgtaattttttttatttttaagaaggttatttgtaattttttttatttttgagaatgtattttgtgagatttatttttgtttattagagaataattttttttgattgtaattttttattatttttttaaattttataaaacggttttatttttattttttttcgttgatttttttttcggatttagttcgtttgtatttaggtg

SEQ ID NO: 95 - DNA, 3377 bp, Artificial Sequence
  chemically treated genomic DNA (Homo sapiens)
tattcgcggttttatgagtttgtattgaagtcggatatttataatattttttttaatattttattattttttttttttgataattatgttttgagaatttgaagtaatagatatgaagagttttaagggattgtattaatgtacgttaagattagtttttattatatagtttaatgatacggttttaggtttagaagggatgttttatatttatagaattttatcgagtttaggtgttagtttagagaatttattatttttttgtttttttttaagagttaattgatgggatagtatgtaaagtatatgcgtttttgttgttaaaatagtagttaaaattgtttgtttagatgtgtaagattttatgaaatgttttggtaaaagttagtttaggagtgttggttaaggtgttgaagcgaagtaaggggagttaggattatttttgttattgaatttttttttttttatttttttttaaagatagcgagtttatttattttgataagatattttaggattttaaatttgatataattttggagaaagtagtgcgtgtgtgtgtgtgtgtgtgtgtgtgtgtgtgtggtgtagaagggtatttgggatatataatttttatagaaattttagtgttataaaaattttaggaggatttatatttaaaaaaatatataatagtttaagttgtttattttaattgaacgttgtgtgtttttattagatttttagtgagatttagtttaatgagttaattgtaaaataaagtttttgttaagggaatggtagaaaatgataaaattataattttgaatgattatttaaaagtaaaaagtattttttattattgtgtggagatttttttatttttatttttattcgaattgaatttttttttttaatgtttttttgaatagtttgtttttggtgttttgaaaatgtgtacgttgatagtagtattatatgttgtttttggtatagagtgagttaatagttgaattatttttgggtaattgcggattgtagttagtgtaagtgtaagagaaggtattttggttattaattcgttttatattttaattattttcgttcgttttatattttttgggtattcgatgttttttttttttgttaggtaatttgttttcgttttgtttaatttttcgatttttggttttagagaatagttttggttgtgggaattggttttgggaagtttttggcgttttttttattggtgattggtaagagtaatatttttatatttttaaaaagagtcgtttagtttttaatgatattttttggtaaaaaagaaaatgaaatatataattcggatttcggtttattaaacgtaggttaagagcgcggttgttgagtttcggttttgttgtgaggttgttgtttttattcgtttttcgtttttattagagttgatttgttttttgttattttttttcggtagtgtggatttattgtaacgtaggaatatttgggttggtatggataggattttagtattagatgttggttgttgttttagggatttttcgcggaaattatttagtatttagaagtcgttttaataaggaagtaattagtaaagtattgttggtgggagaatttcgcgaaatattttagaaaaatattagaaatcgttggagatttaatgatttacgttttttttagtttgtgttttttagttttttttggaggagtattaagtggtttgtgggtttttattttgcggtgggagggttgttttaagtatatttatttttgcgatagttaacgtcggggggttttagttttaattagggcgaggattacggattgtattttttttttttagcgtattggtttgtttattggagggtgagagggacgcgtagattttcggatttaggggttttgttttgtagatttttttattttattcggggtttttggtattcgtattatttagtattagtgtgattggcggtgtatttcggttttttcgcgttttattaaagtttttgtatatttttttttacgttgcgtttttgttatttacgtagttgtttttttgagcgtttcgcgtgtataaacgcgttttcggtttttacgcgtcggtggcgttgtttcgttgaggtggcgtcgggggagttcgtagaggcggcgggggagggagtgcggaggagaggattcgtgagttgcggggatttgggttcgtcgagtttttggggaagttgggtttcgtttttttcgggcgtttggggcgcgcgggaaggcgcggaggacgcgtcgtatttattcgttgttgttgtcggttgttgattgttatcgcggcggcggacgcggcgttgtgtcggagttcggtcgtttgtttaggttttaataggtttcgggtgaatttgcgggttcgtttatcggttatcgtcggttacgttaatcgcgtcgcgggttcggggcgcgtttttcgtcggtttttttcgcgttaattttttttatttattcgtcgtttaggaagcggaattcggagtttttttttttttttttttcgtttaattcgtaagaggcgggttttttttttttgtatttttattttttttattttttttttttttttgaagtttttcgaagattttttaaattttgcgttttttcgggcgcgcgcggttaattcggttggcggtcgggttttgtagcggcgtatttggagcgggcgtcgcgggacgcgtgtggggcggtttttgttcgcgtcgtttatacgggtttagttggtcggtcggggttgtttacgtcgttcgggggaattgtaggttgcgggggagggcggggggcggtcgtcgaggggtttcgggcggggtttgtttaaggtcgtcgtttgtttaaggtcgttagttttatttggaggttgttgggagagttggagttttggatgtatttgtcgtttagatttttattttttgggttcggttagtgggtgggggttaagttcggttcgtttttttattttcgggaaggggttagaggtttattaaagatttggtggttgggattttagtagtatcgtttaagttagcgtttggaaggtttttttgttagaagtttatgtttagggttttggaataagtttttttatttatttatttttttaatgagtatttattaagcgtttattatatgttagtttatattgttttggaaattgaggatacggagaggaatttagtaattatattttaaggttgtgtagagttgataggttttttcggggtaggggtgggagatagtaagtaattaagcgaataaataaataaatatagagaaattaaggagatagtttaagttattaatacgaatttaaaattaataaattagcgttttgggggtaagag

SEQ ID NO: 96 - DNA, 3377 bp, Artificial Sequence
  chemically treated genomic DNA (Homo sapiens)
tttttatttttagaacgttgatttattggttttgagttcgtgttagtagtttaaattgtttttttgatttttttgtatttgtttatttgttcgtttggttatttgttgttttttatttttatttcgaaaaaatttattagttttatatagttttaaagtgtagttgttaagttttttttcgtatttttagtttttagaatagtgtgagttggtatatagtaggcgtttaataaatatttattgaaggagtgaatgaatggggaagtttattttaaggttttgaatatggatttttggtaagggagttttttaaacgttggtttgggcgatgttgttgggattttagttattagatttttaataagtttttgattttttttcgagggtggaagggcgaatcgagtttggtttttatttattagtcggatttagaaaatagaagtttaaacggtaaatgtatttagggttttaatttttttagtaatttttaaatgaggttgacggttttggataggcgacggttttggataggtttcgttcggagtttttcggcggtcgtttttcgttttttttcgtagtttgtagttttttcgggcggcgtggatagtttcggtcggttagttgagttcgtgtgggcggcgcgggtaggagtcgttttatacgcgtttcgcgacgttcgttttagatgcgtcgttgtagggttcggtcgttagtcgagttggtcgcgcgcgttcgggggagcgtagagtttggaaagttttcgagaagttttagaggagggaagggggtgggaagagtgggggtgtaagagagaaaaattcgttttttgcgagttgagcgaggaagaggggggggaaggtttcgagtttcgttttttgaacggcgggtggatagagaaggttggcgcggggaagatcggcgggaggcgcgtttcgggttcgcggcgcgattggcgtgatcggcgatggtcggtgagcggattcgtaggtttattcggagtttgttgagatttgggtaggcggtcgagtttcggtatagcgtcgcgttcgtcgtcgcggtggtagttagtagtcggtagtagtagcgggtgagtgcggcgcgtttttcgcgttttttcgcgcgttttaggcgttcggggggaacggagtttagtttttttaaaagttcggcgggtttaggttttcgtagtttacgggttttttttttcgtattttttttttcgtcgtttttgcgggttttttcggcgttattttagcgaggtagcgttatcgacgcgtaaggatcgggggcgcgtttgtgtacgcgggacgtttagaggagtagttgcgtgggtagtagaagcgtagcgtgggagaggatgtgtaggggttttaatggggcgcgagggggtcggaatgtatcgttagttatattggtgttaagtgatacgagtgttagagatttcgggtggggtggggggatttatagaatagaatttttgagttcggaggtttgcgcgttttttttattttttagtaaatagattagtgcgttgagagagagggatgtagttcgtggttttcgttttggttagagttggggtttttcgacgttaattatcgtagaaatagatgtatttggaatagtttttttatcgtagggtaaaaatttataaattatttaatatttttttagaaagggttgaggaatataggttggaggagacgtgggttattaggtttttagcggtttttgatatttttttaagatgtttcgcggggtttttttattagtaatgttttattggttatttttttattgaaacggtttttaagtgttgggtgattttcgcgggaagtttttggggtagtagttagtatttgatgttaggattttatttatattaatttagatgtttttgcgttgtagtaggtttatattgtcggggagaggtggtaagagataaattaattttagtggaaacgggaagcgagtgggaataatagttttatagtaagatcggggtttagtagtcgcgtttttggtttgcgtttggtggatcggaattcgggttgtgtgttttatttttttttttgttagaaaatattattaggaattaaacggttttttttaagagtgtgaaagtgttatttttgttagttattaatgaggagggcgttaaaagttttttagagttagtttttatagttaggattattttttaaagttagaggtcggaaagttgaatagaacggaagtaaattgtttggtagagggaagaggtatcgggtgtttagggggtgtagagcgggcgggggtgattggagtgtgaaacgaattggtggttagggtgtttttttttgtatttatattagttgtagttcgtagttatttagaggtggtttaattgttagtttattttgtgttagggatagtatgtggtattgttattagcgtgtatatttttaggatattaaagataaattgtttaaaagaatattagaagaaaagatttaattcgagtaaaagtagagataagaaaatttttatatagtagtagaaagtattttttatttttgaatgattatttagaattgtggttttgttattttttgttatttttttgataaaaattttattttgtaattgatttattggattgaattttattgaggatttgatggaaatatatagcgtttaattggaataaatagtttaaattgttgtgtgtttttttaaatgtagatttttttagaatttttgtggtattagaatttttataaagattatgtattttagatatttttttatattatatatatatatatatatatatatatatatacgtattgttttttttaaaattatgttagatttgaaattttagggtattttgttaaaatgaataagttcgttgtttttaaaaagaggtgggggaggggagatttagtggtaaaggtggttttgattttttttgtttcgttttagtattttggttaatatttttaaattagtttttgttaagatattttatgggattttatatatttaggtaggtagttttggttgttattttggtagtaagaacgtatgtgttttgtatattattttattagttaatttttgaagggaaataggaaggtgatgagttttttgagttggtatttgaattcggtgggattttgtgggtgtagagtattttttttgaatttaaaatcgtgttattggattatgtggtagagattaattttagcgtatattgatgtaattttttaagattttttatatttgttgttttaagtttttaaaatatggttgttaagggagaaaaatgataggatgttggggaaaatattatggatattcgattttagtatagatttatagaatcgcgggtg

SEQ ID NO: 97 - DNA, 3043 bp, Artificial Sequence
  chemically treated genomic DNA (Homo sapiens)
aaaatttaaatttataatttgaggtatttgggaagtcgtttttttagggcggaatggttacggaaattgggtaggttgggggtttttttggggaatgagggagtggaggagttttttgttttttttgttagattagaaagagaaacgttttaagaatttgggtttttattttttaggcgttttttttggaggttttttagggatcgtttatagcgtttttttttagttttttttttttttttatttttttttttattcgtttcgtttcgcgttcgtttcgtttttcggttcgcggggttttaaggacggttggtcgttttcgttatagttattcggtcgtttagagcggcggggcgtacggggtcgagagagttagttttagggtttggggttgggaattgaagtttggcgtgaaggaagtgggagttcgggtcgaggaggcgaaggggaaaggaaaagcgaggggaatttgagcgggagggttttgagaggagcgggaggttgcgggaaggggaggtttggtatttttgggggttatgggggtcggggcgcggttttcggtttgggagggcgcgggtttttttcggtagcgtcgttcgttggtttagttacgcgtgttgtgcgttgcgaggtcggcgggggtttcgttgggttcgggggtgttttcgggggtcgtttgcgtttagttatggtagggcgtttttcggtgaaatggggttcgaggcgggtttcgatttcgcgtcggcgttgcggatcgttcgggagttgtagtcgcgggtgttcggtgttcggtttgtaggtagtgttattagttgattgtattgtggtggttataattattaattttattgttattaaaataaggtatagtattatcgtcgttcggtcgggaagaagacgtcggttcgggtagttcgtagttttcgagagaagatgtttgagaagcgcggcgtcggcgtgggttttgcgtagtttgtttcgcgagcgttcgttgtaagtgcgaggaaattcgcggtttttttagatatagttaaattgttagttttttttaggagttatagaagatgaaatagttttatgttaggaaagtaaaatttttggaggtgaagtttttttatttatgtaacggttaatattgtatgttgtgatttattgtgtttatttgttatcgtttagtagagtatttattaagttagtaatttagttgagttttaatttaattaatgaattgtttgtttgttataacgtgttggggtattaatttgagattgtaattttttttatgagtttagttattaggtagtgtagttagttgattgttaatagtattaattattaattatacggttaggtaaaaagatttgggaattcgtttaaatgagttgtttgtgtattattaatgtgcgtggggaagaggggtgttggaaaatgttgattttatttattgtttattaattgtttagttaaaagaaaaaaattaatattttagttattaagtttataatgtatgtaatgtgtatgtatgtggggttttgttttgttttttttttaatatttttttaggtttttaattaaaattttagatataagggggaatatgattttttttttagttgattgatgtatgttattatatgaatatgtgattattaattttttgagattatattgttagtaatattttgaaagtaatattgttagtaatatttcgaaagaataaagtgttataaagatataaattgtggttattgttatgtgtttattttttttgttaaattgattttatgatgtttattttagtttttgttatagtaattttaatttttttattaatgaagtggttaagttgtttttgttatgataaaaatttttcgggaaagttatttatatatatagatttgttaatatttttataagaaatatattaataaaattttttatattttttttttttatgaagagattttgtttatttattaagatgtatttttttttttaagtaattatttataattgttggagtttatgtaatttttagtgggagtgattagtaaatgtatttatattttaaatttagtttgttttttaagatttaaaggatttagaattttaaaattatagaaattgtatatatgggtacgtattcgtttagtttaggtttttagtttttaagggttaggtttttaggcgtgaattttttagcgtaacgtttttagaatttttatttagtaggtgttgtttttggtaatttggtttggaagtggggattggggtaatggggttgaggaatttaaagtttatttagttatttttttggggggaggggagaggatgtggtagtttattgaggatataagaagttaaattatttttttattgatttcgataggatataatttaaagttgacgttttgatttttttatatttaagatttggattggttttaaaatttgattatcgtaggggtgggttttcgacggtttttacgcgcgtggcggattttaatatttatttaggaaatcgagggtagtcggtaggggttggtattaatttggcggttttcggaggggcggggtaggggcggggcggggggaggggagaggacgtttgtagaagcgtttttagttgttatggaaacgggatttagcgaagaatttagcggtcgaaaagagttttaggaaatgtgtttttcgggattattggtatttgttggtttttcggaataagatgttaatttggttaagtagttttggatttcggcgtcgatgtatttttttagcgaattttagttggtgttgcgtagagatagtagttagcgtttgtcggtggcgcggtttaggaggagtagagggtttggtgagtagaatagcggttttttgttagttatatttgttttatcgtaattggtttgtaggtattagagttttttttaggagaaattgtaatggtatatataaatagttataagtatatataaatgtatgtataaatattttttgaatttttttagtaatttttttattcgaaaaggattagtggtat

SEQ ID NO: 98 - DNA, 3043 bp, Artificial Sequence
  chemically treated genomic DNA (Homo sapiens)
atattattgatttttttcgggtggaagggttgttggaagggtttaggaaatatttatatatgtatttgtatgtatttataattatttgtatatattattgtagttttttttggaaagggttttggtatttgtaggttagttacggtgaggtagatatgattgataggaggtcgttattttatttattagattttttgttttttttgggtcgcgttatcggtagacgttgattgttgtttttgcgtagtattagttgagattcgttagggggatatatcgacgtcgagatttagaattgtttagttaagttggtattttgtttcgaggagttagtaaatattagtaatttcggggggtatattttttgggatttttttcggtcgttaggtttttcgttgggtttcgtttttatggtaattgaggacgtttttgtaagcgttttttttttttttttcgtttcgtttttgtttcgttttttcgagaatcgttaagttggtattagtttttgtcggttgttttcggttttttaggtaggtgttgggattcgttacgcgcgtgggggtcgtcggaagtttatttttgcggtgattaggttttaggattagtttaaattttggatatgggagagttaaaacgttaattttgggttgtgttttgtcggagttagtgggggagtagtttagttttttatatttttagtgggttgttatatttttttttttttttttagaaagatagttaaataaattttaaattttttagttttattgttttaatttttatttttaaattagattgttagggatagtatttgttaggtggaagttttgagaacgttgcgttggagaatttacgtttgaaagtttagtttttgggagttagaggtttgaattgggcggatacgtgtttatgtgtatagtttttgtgattttaaaattttgaattttttaaattttaggaaataagttggatttaaagtgtaagtgtatttattaattatttttattaaaagttgtatagattttaatagttgtaaatgattatttaaaagaagggatatattttaatgagtgaatagagtttttttatggaaaaaagaagtatgaaaaattttgttaatgtattttttataaaagtattaataagtttgtgtgtatgagtagttttttcgggagatttttgttatggtaggaataatttaattattttattgatagaaaagttaagattattgtggtaggaattgagatggatattataaagttaatttagtaaaggaaatggatatatagtaataattataatttatgtttttatggtattttattttttcgaaatattattaataatattatttttaaaatattattaataatatagttttaagaagttaataattatatgtttatataataatatatattagttagttaagaaaaaaattatatttttttttatatttaaaattttggttaagagtttgaaggaatattgaaaaaaaaataaaataaaattttatatatatatatattatatatattgtaaatttagtagttgaaatgttgattttttttttttggttgagtaattaataggtaatggatgaaattagtattttttaatattttttttttttacgtatattgatgatgtataggtagtttatttggacgaatttttaaatttttttatttggtcgtgtggttagtgattggtattattagtaattagttaattatattgtttagtaattagatttatagaaaaaattgtagttttaagttggtattttaatacgttgtgataggtaggtaatttattggttgagttggagtttaattgagttgttagtttggtgaatattttattagacgatggtaaatagatatagtgaattatagtatatagtattaatcgttatatggatggaggggttttatttttagggattttgtttttttggtatgagattgttttattttttgtgatttttagagagagttaatagtttaattgtatttggagaaatcgcgggttttttcgtatttgtagcgggcgttcgcggggtaggttgcgtaggatttacgtcgacgtcgcgttttttaggtattttttttcgaaggttgcgggttgttcgagtcggcgtttttttttcggtcgggcggcggtgatgttgtgttttgttttgatggtagtggagttagtgattgtaattattatagtataattagttaatgatattgtttataaatcgagtatcgggtattcgcggttgtagttttcggacggttcgtagcgtcgacgcggggtcggggttcgtttcggattttattttatcgggggacgttttattatggttgggcgtaagcggttttcgaggatattttcgggtttagcgggattttcgtcggtttcgtagcgtataatacgcgtagttgggttagcgggcggcgttgtcggggaggattcgcgtttttttaggtcgggagtcgcgtttcgatttttatgatttttaggagtgttaggtttttttttttcgtagtttttcgttttttttagggttttttcgtttaggtttttttcgttttttttttttttttcgttttttcggttcgggtttttattttttttacgttaggttttagtttttagttttaaattttagagttggttttttcgatttcgtgcgtttcgtcgttttgagcggtcgagtgattgtggcgggggcgattaatcgtttttggaatttcgcgggtcgaggggcggggcgggcgcgagacggggcgggtgggggaggggatggggggggggaggaggttgagagaaagcgttgtgggcggtttttgaagggtttttaagggagacgtttagaagatggaggtttagatttttgagacgtttttttttttgatttagtaggagggataaagagtttttttatttttttattttttaagaaggtttttagtttatttagttttcgtgattatttcgttttgggaaagcggttttttaggtattttaaattataggtttgaatttt

SEQ ID NO: 99 - DNA, 4908 bp, Artificial Sequence
  chemically treated genomic DNA (Homo sapiens)
ttagaggttacgtcggttatttttttttgtttgtaatgttttagatatatatgttttgtaatttagaaatttgtggttaagaaaggtgttaagattcgtagaaaagttgggatataggaaagagaaacgaaggttgataatagattttacgggggtgagggagattaggttaattagagaagatagtatacgttagttttagatgtagaataattggatttggatttaataagttgagtataagtggagacgtaattagaaaagattgaagtgaaatttttaagtaaaaaaaaaaaaaaaaaaaaaaaaaggatggagtagtagttagaggggatgttatttttataaaagataaataaattgatggaatggaattttgtagggagagagaggattagtagagagagggaggcgtaggaaaatgaggagtggggtataaaggtggggtttttagggagaagaggagtcgattttagagggggagaagaaaaggatatagagttggttgtatagagaaaaggggttaaggtagagaagatggcgggatggtgtgagacggagtttatagaaatatttagagaaggcgacgattatatagaggagtttttagaggggcgaatttttgaggaagatgaacgcggagggtggagttagttagaaatttagaaaaattagaggcgttttcggtagcgaaggaagtcgggaaggggttaggttattagggtatgaagtacgggagaaaatgggttcgaagagggagagcgttcgagagaaaaggaaaattagagattaggaaaattataatcgatataaagataagaagagatataaggaaaggggtgtaatttgaggaaggagggttcggtaagtaattcggtaattatagcgttgggagagaacgtataaaagaagggtagtttaggagttgtggggtatcggaagagatataatagaaaacgtaggtttttatttagtaaaaataagttacgcgcgaagtcgaggtataaggtaagggaaggttagaaacgaggtaattcgtgtatagatcgggtttggttaacgttttaggggcggggttaggcgggtcgtttttggggggcggggttagtttcggtttaataaggggtattcgacgttttattggttatttgtttcgaaagggggaagatagtttgggcgggtaggacgtgcggagggagaggtagcggtggcgcgaggtttaattcgaagcgttattggtgggattgatagttttgtgcgttaagaagttggtagaagggaaggggcgggatattagtttaggattttaaatcgtattggtcgtttgtttcggttgagagaggcgatgtttgaagtttattggtttttgtgagatagggtaagaaaagtagcgcgagtttggcggtttttttggttatttttttatagtgtttttgggcgtttttttgattgaatttgattttattggaggttgtggtaatcgtgaattagttgtacgaatacggttttttttgttttttcgttttttttttttttagtcggattttttaatttaggtatttttttttttttttttcgcgtttttttcgttttcgcgttttttttttttttttttgtttcgcgggttttttggcgcgttttcggttttttattcgttttttggggtacgggaaggggggagggggatatgtatgaaattaattgttggtagtggttataggagtaggaagcgttggatatagtgattttatatgtttatataaaaatttgaataaggtgtgagcgtaagagagatattagtgttttaaggagaaggtttttggtttagattagggtttagtatatgataggggtttagtaattatttgtggaatgaatgaaggagtgaaggaaaataatttgaaagtggggtaggtggcgggtgcggtggtttatgtttgtaattttaatattttgggaggtcgaagtaggtaggtcgtttgaggtaggttaggagtttaagattagtttggttaatatggtgaaattttatttttattaaaaatataaaaattagacgggcgtggtggtataggtttgtaattttaggtattcgggaggttgaggtaggagaattgtttgaatttaggaggcggaggttgtagtgagtcgggattgtattattgtattatagtttgggttatagagtgagattttattttaaaataaaaaaaaagaaagaaagaaagtgggataggggagttaagtatagtggttttagtttgtagttttagttattggggaggttgcggtaggaggattgtttgagtttaggaggtggaggttgtagtgagttatgattacgttattgcgttttagtttgggcgatagagcgagattttgttaataaaaaaaaaaaagaaagtggagtagggaatttatgagaataaggtaattattgggggtgtaagagagggttttgatttaaaggggtataagaataaaataagattaaaggaatgtaaggaggtagttgttttgtagggtatagatgagattaagaattgaaattgaattaagaattgaaaggggtataaaattattggtaggtattggatgaatgtatgagagtggggtgagtattgttgaagaggatgttaggaaatattgttgggacggaatagggtgtttgtgaaaaggggatgtaggattcgttgaaggggtatgtgaggatatgagtaggttggaatttaggatgtgtgtgtgggtgggaaagtgtttggattgaaagaaaagaatgtttgaattgaaagaatatagaatgtcgggcgtagtagtttatgtttttgattttagtattgtgggaggttaaggtaggaggatcgtttgagtttaggagttcgagattagattagtttgggaaatataatgagattttgtttttataaaaataaaaataaataattaaaaaaaaattttttttttgagatagagttttgtttcgttatttaggttaaagtgtagtggcgcgattatggtttattgttagttttgtttttcgggtttacgttatttttttgttttagtttttggagtagttgggattataggcgttcgttattacgtttagttaattttttgtatttttagtagagatagggttttattgtgttagttaggatggtttcgattttttgattttgtgatttattcgttttggttttttaaagtgttgggattataggtttgagttatcgtattcggtttaaaaatttttaaatttaaaaaaaggggggacgggtgtagtggtttatggttgtaattttagtattttgggaggtcgagataggtagattatttgaggttaggagttcgagattagtttggttaatatggtgaaatattatttttattaaatatataaaaataaaaaaaaatagtcgggtatggtggtttttgtttgtaattttagttatttaggaggttgaggtaggagaatcgtttgaattcgggaggtggaggttgtagtaagttaagatcgtgttattgtattttagtttgggagatagagtgagattttattttaaaaaaaaaaaaaaaaaaaaagaaagaatatagaagaggaagaggagaggggtttttgaagaaggaagatatttgagaaatgttatggggtaaagaggggagaaagttgggaaagaagttagaattagggcggggtttaaagaggggtaggatggagatttgtaggtgtggtttttagggtaggagggttgttaggggtaggtttatttggttatgtttattttttatttttgtttttagatttatggaatttagtgatatgtttgttggttattattgttttttagattttgttttttgggatgagattagagatttttagagtatagagttgatttttaggagagttattagtcgttttttaatttgcgttcgttgtcgtaattatggtgttatcgtttattttaagggttataagcgtttttgttttttttaggtttgcgagtgttataaatgtgtttttattttgtgagtatgaggtttgggaggggaggaggatgagttttttttaaagggtggttgatttttgatttgtaattttttatttttagggagcgtcgtagggttatggttgtttaggtggttttgcgtaggtagtaggaggcgtagttaaagaagtatttgatgaggagaggggaagttttttttaaagtttttaattattttagaaagggaattatttagttataggttttttgtgagtgtttttgattagcgatggggtaggagtttgggtataggaggtaggtatgggaaaaagaggtttagttttgttgttgaattggtgtacgattttgaattaagggtttttattttttcggttttagttgttttagcgttgagagaatgtagcgagttttgtgggttaaaaatgggttagaggtcgggtatagtggtttacgtttgtaattcgagtattttgggaggttgaggtaggtagattacgaggttaagagatcgagattattttggttaatatggtgaaatttcgtttttattaaaaatataaaaattagttgggtttggtggcgtatgtttgtagttttagttattcgggaagttgaggtaggagaattatttgaatttaggaggcggaggttgtagtgagttaagattacgttattgtattttagtttgggcgatatagtaagattttattttaaaaaaaaaaaatgagttagatgggggagatgagaattgtttggggttggggtaggataggggttaggagaaagggtttattagagttttttttggttttttatagttggaaaggagaatatagtattttagttttagattttttatggggtagttttgttggtatcgatatttttcgggaag

SEQ ID NO: 100 - DNA, 4908 bp, Artificial Sequence
  chemically treated genomic DNA (Homo sapiens)
tttttcggggggtgtcggtgttagtaggattgttttatggggggtttgaggttggggtgttatgtttttttttttagttgtgaaggattagggagagttttaatgagtttttttttttgatttttattttattttaattttagatagtttttattttttttatttagtttattttttttttttgagatggagttttgttgtgtcgtttaggttggagtgtagtggcgtgattttggtttattataattttcgttttttgggtttaagtgatttttttgttttagtttttcgagtagttgggattataggtatgcgttattaagtttagttaatttttgtatttttagtagagacggggttttattatgttggttaggatggtttcgattttttgatttcgtggtttgtttgttttagttttttaaagtgttcggattataggcgtgagttattgtgttcggtttttagtttatttttgatttatagaattcgttgtatttttttaacgttgggatagttgaggtcgagggagtagaaatttttagtttaaggtcgtatattaatttagtagtaggattgggttttttttttttatatttgttttttgtatttaaatttttgttttatcgttggttagagatatttataggggatttgtggttgagtggttttttttttgaagtggttgggagttttgggagaggttttttttttttttattaggtgtttttttagttgcgttttttgttgtttacgtaaggttatttgggtagttatgattttgcggcgttttttaaaagtggggagttgtaagttaaaggttagttattttttggaggaggtttatttttttttttttttagattttatatttataggatgaggatatatttgtgatattcgtaagtttggaagaggtagaggcgtttgtggtttttgagatgggcggtgatattatggttgcggtagcgggcgtaggttggagagcggttgatggtttttttggggattagttttgtgttttgggggtttttggttttattttagggggtagagtttaaggggtagtggtagttagtaggtatgttattgggttttatggatttaggggtaggagtggaaggtaagtatagttaggtgggtttgtttttaataatttttttgttttggagattatatttgtaggtttttattttgtttttttttagatttcgttttgattttggttttttttttagtttttttttttttttattttatgatattttttaggtattttttttttttagaaatttttttttttttttttttttgtgttttttttttttttttttttttttttttgagatggagttttattttgttttttaggttggagtgtagtggtacgattttggtttgttgtaatttttatttttcgggtttaagcgatttttttgttttagttttttgagtagttgggattataggtaagagttattatgttcggttatttttttttatttttgtatgtttagtagagatggtgttttattatgttggttaggttggtttcgaatttttggttttaagtgatttgtttgtttcggttttttaaagtgttggaattatagttatgagttattgtattcgttttttttttttttaaatttaaaaatttttaggtcgggtgcggtggtttaagtttataattttagtattttgggaggttaaggcgggtggattataaggttaggagatcgagattattttggttaatatagtgaaattttgtttttattaaaaatataaaaaattagttgggcgtggtggcgggcgtttgtagttttagttattttagaggttgaggtaggagaatggcgtgaattcgggaggtagagttggtagtgagttatgatcgcgttattgtattttagtttgggtgacggagtaagattttgttttaaaaaaaaaatttttttttaattgtttatttttatttttatagagataaggttttattatgttttttaggttggtttggtttcgaatttttgggtttaagcgatttttttgttttggttttttatagtgttaggattagaggtatgagttgttgcgttcgatattttgtatttttttaatttaaatattttttttttttaatttaaatatttttttatttatatatatattttaggttttaatttatttatgtttttatatatttttttagcgagttttatattttttttttataagtattttgtttcgttttaatagtgttttttggtattttttttaataatgtttattttatttttatgtatttatttaatgtttattagtagttttatgttttttttaatttttagtttaattttaatttttagttttatttatgttttgtaaagtaattgtttttttgtatttttttagttttattttgtttttgtatttttttaaattagaatttttttttgtatttttaataattattttatttttatggattttttgttttatttttttttttttttttattgatagggtttcgttttgtcgtttaggttggagcgtagtggcgtgattatggtttattgtagtttttattttttgagtttaagtaatttttttgtcgtagtttttttagtagttgggattataggttggagttattatgtttggtttttttgttttattttttttttttttttttttttgttttgagatggagttttattttgtagtttaggttgtagtgtagtagtgtaatttcggtttattgtaattttcgttttttgggtttaagtaatttttttgttttagtttttcgagtatttgggattataggtttgtgttattacgttcgtttaatttttgtatttttagtagagatggggttttattatgttggttaggttggttttgaatttttgatttgttttaagcgatttgtttgtttcggttttttaaagtgttgggattataggtatgagttatcgtattcgttatttgttttatttttaagttatttttttttatttttttatttattttataaatggttattgagtttttgttatgtgttaggttttgatttgggttaaaaattttttttttggggtattaatgttttttttgcgtttatattttatttaggtttttgtgtaaatatgtgaagttattgtgtttagcgttttttgtttttgtggttattattaataattaattttatgtatgtttttttttttttttttcgtgttttagggagcgagtggggaatcgggaacgcgttaaggggttcgcgaggtagggaaggggagagggggcgcgagggcgggaggggcgcgagggggaggagaggggatgtttgggttagggagttcggttaagagggaggaggacggaaaggtaggagggatcgtgttcgtgtagttagtttacggttattatagtttttaatggagttagatttagttaagaagacgtttaaagatattgtgagaaagtggttagaggaatcgttaagttcgcgttgttttttttattttgttttataaagattaatgaattttaagtatcgttttttttagtcgaggtagacgattaatgcggtttgagattttgaattgatgtttcgtttttttttttttgttagttttttggcgtataagattattagttttattaatagcgtttcgagttgagtttcgcgttatcgttgttttttttttcgtacgttttgttcgtttagattgttttttttttttcgaggtaggtggttaatggggcgtcgagtattttttattggatcgaggttggtttcgttttttaggaacggttcgtttggtttcgtttttggggcgttgattaagttcggtttgtgtacgggttgtttcgtttttggtttttttttgttttgtatttcgatttcgcgcgtggtttgtttttgttgagtggaggtttgcgttttttgttatgtttttttcggtgttttataatttttgagttattttttttttatgcgtttttttttagcgttgtgattatcgggttgtttatcgggttttttttttttagattgtatttttttttttgtgtttttttttgtttttgtgtcggttgtgatttttttaatttttgattttttttttttttcggacgtttttttttttcggatttattttttttcgtgttttatgttttgatagtttggttttttttcggtttttttcgttatcggggacgtttttagtttttttgaatttttggttggttttatttttcgcgtttattttttttaagagttcgtttttttgggggtttttttgtgtaatcgtcgttttttttgggtatttttgtgaatttcgttttatattatttcgttattttttttgttttggttttttttttttgtatagttagttttgtgttttttttttttttttttttaaaatcgattttttttttttttgagagttttatttttgtgttttattttttatttttttacgtttttttttttttgttggttttttttttttttgtaaggttttattttattaatttgtttgttttttgtaggggtggtattttttttgattattgttttattttttttttttttttttttttttttttgtttgaggattttattttaattttttttggttgcgtttttatttgtatttagtttgttaggtttaggtttagttgttttgtatttgaggttggcgtgtgttgttttttttgattggtttaattttttttattttcgtgagatttgttgttagttttcgttttttttttttgtgttttagtttttttgcgggttttggtattttttttggttatagatttttgggttatagagtatgtgtgtttgaggtattgtaggtagaaaagggtggtcgacgtgatttttag

SEQ ID NO: 101 - DNA, 7563 bp, Artificial Sequence
  chemically treated genomic DNA (Homo sapiens)
gttacggcgttcggttaatattaaattttaagttttaaaaataattttttttggttttatgttttatttttagatatattgatgtggtgaatttgtttttatagttttgggtggttttgtttttagggtagtttgatatttggtttgtattttggttttttggggttagagttatatattggttgttttattgttttgggttaagggagttgatttattttagttttgttgagcgttgggttttatagggattttttgtggtgttttatattttcggaggtttttgtattttgcgtttttataagggtattaattttttttatgaaggttttgtttttagaatttagttattttttaaaggtttatatttaaatattattaattgaagattagtttttaatatgtaattttttggggagataaaaatatttagattataataattttaatattatttataattatatttaatatattatgaatttaatattttaaagatattgttagattggattaaaataaatgttttaatgtttatatgggatttatattaaatataaagatatagaaagatttaaagtaaaaagattttttaaaaaaagttgttttatgataatattaatggaaaaatagttaatgtagttgtaatgatattaaataaaagtggttatatatagtaagtaggaaatggttgggcgcggtggtttatgtcggtaattttagtattttgggaggtcgaggagggcggattacgaggttaggagatcgagattattttggttaatatggtgaaattttatttttaataaaaaatagaaaaaattagttaggcgtggtggtaggcgtttgtagttttagttatttaggaggttgaggtaggagaatggcgtgaattcgggaggtggggtttgtagtgagttaagatcgttttattgtattttagtttgggcgatagagcgagattttgttttaaaaaaaaaaaaaataaaaaaagagaaaaaagaaatagaaatttagttaaagatgttataatgataaaaggtaatatatatagataatattataattatatgtgatatattttatattataatgttaaatgtatgattatttgataaaattaaataatatgatgataaaattattataattaggttattaagatgaaagggtaaattttataggaaaatatagcgattttaaattcgtgtatttttaataaaatagtattaaattatgtagtgaaaattggttagttatggtggtttgtgtttgtaattttagtattttgggaggttaaggtaggcggatcgtttgaggttagaagttcgagattagtttggttaatatggtgaaattttatttttataaaaaatataaaaaaaaagaaaattagttgggcgtggtggtgtgtttttgtagttttagttattcgggaggttgaggtaggagaattatttgaatttgggaggtataggtttttattattatattttagtttgggtaatagagtgagtgagattttattttaaaaaaaaaaaaaagtaaaattacgtagtataagttgatagtatataatgaaagcgtaagtagagaaatttatatttattaattgaaatttttttttttcgtttttttagtaattaatgagatagttagataaaaatattagtagaagttaggtacggtggtttatatatgtaattttagtattttaggaggttgaggttggtggttcgtttgagtttaggaatttaagattagtttgggtaatatggtgagattttgtttttacgaaaaatataaaaaattagtttggtgtggtgatgcgtatttgtaattttagttattaggggtgttgagaggggatgattatttgtgtttaggaggttgaggttgtagtgagttgtaattgtattattgtattttagtttgggtgataaagtaagatttagttttaaaaaaaaagaaaaaaaattaatagagaaatttgaataatatagtaagtttgattagttgatatatgtagagttttgtatttaataagtgtaaaataattttttaagtatatatgaaataattagaaaataattatatattggggagtaagttttaaaaaatatttatgaattgaagttatattgagtatgtttttagtttatagtgtaatttaattggaagttaataataaaaaggttagaaaatttttaaacggttgaagatgattaattatatatatatatgtgtatatatatatataaatatatatggatatacgtgtatatatacgtgtatatatacgtatatatatatgtgtatatgtgtatataaatatttatacgtgtatatatacgtgtataaattatatatatgtgtatatatatatatatatatatatgtgtgtatatatgtgtgtatatatatacgtgtgtatgtgtatatatacgtgtgtatatgtgtgtgtatatatatataagtgtgtatatatgtgtgtatatatattgtgtatgtgtgtgtatatatacgtgtatatgtgtttgtatatatacgtgtgtatatgtgcgtgtatatatgcgtgtgtatatatgtgtgtgtatatatacgtgtgtgtatatatgtgtatgtatatacgtatgtgtatatagttgattatttttaatcgtttggagattttttattatatatattttttttttaatattatatggtgttttattatatagtgttttttacggatatagtttaagaattatttgttattttgttttatagaaagtgtgaaattgtaggggagtcgatttgtatagattttggtaaaaagataattgagtaggtaaattttagggagtttttggatagtggatttttttgttagtggttttggagtttttagttttagttattcgtggttaattgtggtttaaaaatattaaatagaaaattttaggaataaatagtttttaggtttttaattgtgttgatttttgattggcgtgatgagatttagttattttatttttttttatagaaagtgagttttttttttgtttagcgtttttttgttgtttataatatttatttgttagttattttataatttgggttattagatgattgtggtaatgattagtgtggtgtttttaagttgttttgattttattgattttttgtttttatttttttttggttttaaagtgtaagagaagtgatgttggtaatttagatatgttaaagagaagttgtaaatgttttttttaagttaaaaggtaaaaattttggatttaataaggaaagaaaaaaaattatatgtagaggttgttaagatttattaaaaataaatttatttacgaaaatgtgaagaagaaaaaagaaatgtatgttagttttgttgttgtattatttttggatggaagaatagaaatatgtttttattgatcgtaatgggtattatttatggttttaggtatttattggggtttttggaatttattttttataggtatgggggggttattgtatttttggttttatagttttttattgtcgattttaggtttttttggattttaggtttttttttttaagatgtattttagaggattaaaaatatattttatttgggtttcgtttgtttttgtggaagggtagtttattagaggatataatttcgtgttttaatttgtttttttttttaaaggaaatgtggagaaaaaaaaaaagtagaaattggaaataattaatatttagtttattttattcgatttttaggggaattggtgaggagtttaagatgattttttttttttagagaaagaatttaaagtttagggaaatagcgataggggagtttaagattgtttttgttagtttttttttggttatttttcgttgcgatcgtaggatagtttttattagtaggagaatcgggtaagtgtgtggataagtagagagtgtgttgaataatttgtaacgttttatgaaatacgtattgttatggttttttaaaaggttttgcggaagtcgtttgtttttattaattaagtttttatttatataaaagtagaagtagaagtagttttagaaaatatattaataattttttatttttttgaagattagagtagtagaaaataggtgatttgtattataaaattgtatttatttttttttttttttagattttatattatattagtttatttgtgttacggtgtataaaaaatggaataggcgtttttattatattgtttttttttaaaaatagattatttatattttaattttgttttttttaaattcgatttttaataggagagttttttattattttagatggagtgaggttgtacgattgggatggaagaaaggaattttttaaatttgggggaatttttgttttttgttttaagattattttatttggggtgtgggggtgggcgcggcggttagggtagtggaacgtagtcgcggttgcgttatttttgtatttttaggcgcgcgggagggatcggcggggacgcgagttgcggattttggcgaattcgggggaggtagatagggggaggcggatatttagtcggtaggcgttttagttttttcgtagtcggcgggttttttttttgatagttttaggaaaggtagattttttttttagttagttaggtaaggtaaagattgttgttgagtttgttgttattgagggcgtatagattttggggagatcgaagtttgttattgcgggattttgtggggtaatttgggtttacggaagttttttgaaagaggggagaagggtttgtattttttttatggaggatttttttttttttagtatttcgtttgatgtatttaattggtagaagtgagattttaataggtagtagagagcgtttacgtggaggaggtttggggcgtcgcggcgttatttttattttttttcgggatcgcgtttatttttaaagttatacgtcgacgaattaatttatgttttaaatttttttttttagtttcgtgagttcgcggcgatattgggtcgtggggtggttgggaacggttttttttttcggaaaaattagagaacggtttggagagttgaaacgagcgttcgcgagtaggttcgtgtagaatcgggttttaggatcgttgagtttcgtagggcgtttttgggggacgttaggtcgtcggtttttttgttttcgttgagatggataacgtttcgttttcggagttttggttcgttaacgtatcgggttcggattcggcgttgagttgttttaacgcgtcgattttggcgtcgttgtcggcgtcgttggcggtggttgtattagttgtttacgcggtgatttgcgtcgtgggtttggcgggtaatttcgtcgtgttgtacgtgttgttgcgggcgtttcgtatgaagatcgttattaatttgtttatttttaatttggttatcgtcgacgagttttttacgttggtgttgtttattaatatcgtcgattttttgttgcggtagtggtttttcggggagtttatgtgtaagtttatcgtggttatcgattagtataatattttttttagtttttatttttttatcgttatgagcgtcgatcgttatttggtggtgttggttattgcggagtcgcgtcgggtggtcggtcgtatttatagcgtcgcgcgcgcggtgagtttggtcgtgtgggggatcgttatattcgtcgtgttgtttttcgtagttttcgttcggttagacgacgagtagggtcggcgttagtgcgtgttagttttttcgtagttcgaggttttttggtggcgcgcgagtcgtttttatacgttcgtgttgggtttcgttattttcgtgtttattatttgtgttttttatattattttgttgtgtcggttgtatgttatgcggttggatagttacgttaaggttttggagcgcgttaagaagcgggtgatttttttggtggtggtaattttggcggtgtgttttttttgttggacgttttattatttgagtatcgtggtggcgtttattatcgatttttcgtagacgtcgttggttatcgttattttttattttattattagtttgagttacgttaatagttgttttaatttttttttttacgtttttttggacgttagttttcgtaggaattttcgttagttgataatttgtcgcgcggtagtttgatttttttagcgttcggtttcgtaattgttcgttatttttggttagcgagggaggagtcggcgttagagtgcgggattagataggtcgtttaggttttttggggaaatcgattcgcgttttatattcgatttagtagatcggaagcgttgcgattgtgttcgtaggttgattttgttaagttttttaggtgatgcgcggttatgtcgggtgaggagaattgaggttgagatcgttatattgagggttttttaaagtcgaggtggaggaagaggagggtagaggaggagggcggtattgttgggaatcgttttttttttgttttgttttttgttgttttattcgagttttggtagtttggaatttggttggagtcggaatttttcgcgttttcgaagggaggttcgaggacgttgtcggcgtttttaggcgtcggtttcgcgcggtttttgttgtagttggcgtatagtttcggcgggtttttttgtttttcgcgcgttttgggaagacggttaggcgcgcgcgtttggcgtttatttttgtgagattcgtttggtttggcgtcgcgggcggggatcgttgtcgaggtcgttagcgtttttttaattggggaaaatataataattcgggatgttttatcggagtgtgtatatatttgtgtgtgtgtgtgtgtggtgtgcgcgcgtttgcggaggtatgaaatgcggggaaagaggttggcgtttggtagtgattgtttagaatatgatacgaatagtgatttttttttttgtttgtttttattttttttttttgtttttttttttttttattcgtgattttttttgaaaatgttagattttcggagtaaggaattcggagtagttcgggcgcgcggtttcggcgttttttggaggagttagcggtcgagtgtttagcgtcggaggatcgcggggttttgtggtggagtatttcggttgagcgcgttttatagcgttgtggtatattggttatcgttgtttatagaggatgttaagttttatttttatttttttaattggtttcgttttttgttttatttagattagtttgttgtaattgtttatgtgtgtattgttttttaggattgaaaattttataaataatgtatatgttttaattttacgagttgttatgaagattaaataagataaaaagaaatgcgatttatttttttgtgtttttttttttttttgtttttttggtttcgttttagggagagtaggaagtagggatgatcgacggttttaggttttttttgttgtattttttatagggagttgtggattatttgggttttattttttatttgtagacggtattcggtaggtagtttcggtaaatcgggtaaatattgg

SEQ ID NO: 102 - DNA, 7563 bp, Artificial Sequence
  chemically treated genomic DNA (Homo sapiens)
ttagtatttattcggtttatcgggattatttatcggatgtcgtttataagtaaggaataaagtttaggtaatttatagttttttgtgaaaagtatagtagagaaaatttgaagtcgtcggttatttttgttttttgttttttttaaggcggagttaaggaagtagaggagaaagggaatataagagaatagatcgtatttttttttattttatttgatttttatggtaattcgtgagattaggatatgtatattatttataaagtttttagttttgaaaaatagtatatatatgaatagttataataaattgatttaagtaagataagagacgaggttaattgggggaatgggggtggggtttggtattttttataagtaacgatgattagtgtgttatagcgttgtgaagcgcgtttagtcggagtgttttattataaagtttcgcgatttttcgacgttaagtattcggtcgttggtttttttagggggcgtcggaatcgcgcgttcgggttatttcgggttttttgtttcgggagtttgatatttttaggggagattacggataggaaagggaaaaggtaaagaaaaggagtaggggtagatagaaagaaggattattattcgtattatattttaggtagttattgttaagcgttagttttttttttcgtattttatgttttcgtaaacgcgcgtatattatatatatatatatataggtgtatatatatttcgatggggtatttcgagttgttgtgttttttttagttgaagaggcgttggcggtttcggtagcggttttcgttcgcggcgttaggttaagcgggttttataggggtgggcgttaaacgcgcgcgtttgatcgtttttttagagcgcgcggaggataaggggattcgtcggggttgtgcgttagttatagtaggggtcgcgcggagtcgacgtttgggggcgtcggtagcgttttcgggttttttttcgaaggcgcggagagtttcgattttagttaggttttagattgttagggttcgggtggggtagtagggagtagggtagggagggggcggtttttagtaatatcgttttttttttttatttttttttttttttatttcggttttagggagtttttagtgtggcgattttagttttagttttttttattcggtatggtcgcgtattatttggagggtttggtaaggttaatttgcgggtatagtcgtagcgttttcgatttgttaggtcgggtatggggcgcgagtcggtttttttaggaggtttaggcggtttgtttggtttcgtattttggcgtcggtttttttttcgttggttaggagtggcgggtagttgcggagtcggacgttgggggagttaggttgtcgcgcggtaagttattagttggcggaggtttttgcggaagttggcgtttaggaaggcgtagaggaaggggttgaggtagttgttggcgtagtttaggttggtgatgaagtaggagatagcgatgattagcggcgtttgcgggaggtcggtggtgagcgttattacggtgtttaggtggtagggcgtttagtagaggaggtatatcgttaggattgttattattaggaaggttattcgttttttggcgcgttttagggttttggcgtggttgtttagtcgtatggtatgtagtcggtatagtagggtggtatagaggatatagatggtggatacggggatggcgaagtttagtacgagcgtgtagaggcggttcgcgcgttattagaaggtttcgggttgcggaaagattagtacgtattggcgtcggttttgttcgtcgtttagtcgggcgaagattgcgaagggtagtacgacgagtgtgacgattttttatacggttaggtttatcgcgcgcgcggcgttgtaggtgcggtcggttattcggcgcgatttcgtagtggttaatattattaggtagcggtcggcgtttatgacggtgaggaagtagaggttggagaaggtgttgtattggtcgatagttacgatgagtttgtatatgagtttttcgaagggttattgtcgtagtaggaagtcggcgatgttgatgggtagtattagcgtgaagagttcgtcggcgatggttaggttgaggatgaataggttggtgacggtttttatgcggggcgttcgtagtaatacgtatagtacggcggagttgttcgttagatttacggcgtagattatcgcgtagataattggtatagttatcgttagcggcgtcggtagcggcgttagagtcgacgcgttggagtagtttagcgtcgggttcgggttcgatgcgttggcgggttagggtttcgagaacgaggcgttgtttattttaacgagggtagaggagtcggcgatttggcgttttttaaggacgttttacggagtttagcggttttgaagttcggttttgtacggatttgttcgcggacgttcgttttagttttttaagtcgttttttggttttttcggaggaggggatcgtttttagttattttacggtttaatgtcgtcgcggatttacggggttggaaagaggaatttaaagtataggttagttcgtcgacgtgtaattttagaaataggcgcggtttcgaggaggggtgggggtggcgtcgcggcgttttaaattttttttacgtgagcgttttttgttatttgttgaaattttatttttattagttgaatatattaaacgaaatgttagagagagaagaattttttataggaaaaatgtaaatttttttttttttttttaggaaattttcgtagatttaggttattttatagaatttcgtagtggtaagtttcggtttttttagggtttgtgcgtttttagtaatagtaagtttaatagtagtttttattttatttggttggttggggaaggggtttgttttttttggagttgttaggagaaaagttcgtcggttgcggggaggttgagacgtttgtcggttgggtgttcgtttttttttgtttgtttttttcgagttcgttagagttcgtagttcgcgttttcgtcggtttttttcgcgcgtttggaagtgtagggatggcgtagtcgcgattgcgttttattgttttgatcgtcgcgtttatttttatattttaagtaaaatggttttagaatagagaatagaaatttttttaaatttaagggattttttttttttattttagtcgtgtaattttattttatttgaaataatagaaagtttttttgttaagaatcgaatttaaggaaaataaagttagggtgtaagtgatttatttttaaaggagaataatgtagtggaggcgtttgttttattttttatatatcgtaatataaataggttaatgtaatgtgaaatttgaaaggaggaaaaagtgagtgtaattttataatgtaaattatttgttttttgttattttggtttttaaggggatagaagattgttagtatgttttttaaaattatttttatttttatttttgtgtaagtaaagatttgattagtaaagataaacggttttcgtaaagttttttagggaattatgataatgcgtattttataaaacgttataagttgtttaatatattttttatttatttatatatttgttcgatttttttgttaatgagagttattttgcgatcgtagcggagagtagttaaggaaggattagtaggggtagttttgaatttttttgtcgttatttttttggattttggattttttttttaggaagggaaaattattttaggttttttattagtttttttaagaatcgaatgaaataaattaaatattggttatttttaatttttgttttttttttttttttatattttttttaggagagagagtaaattaaaatacgagattatattttttagtaaattatttttttataaaagtaggcgaagtttaaataaagtgtatttttggttttttaggatgtattttagagaagggggtttgagatttagagagatttaaagtcggtagtagaagattgtggggttagaaatatagtagtttttttatatttatgggggataggttttaagagttttagtggatgtttgaaattatggatagtatttattgcggttaatgggaatatgtttttgtttttttatttaaaaatgatgtaatagtaaaattagtatgtatttttttttttttttttatattttcgtggatagatttgtttttagtagattttggtaatttttgtatatgattttttttttttttttattaagtttagaatttttattttttaatttaaaggaggtatttgtagtttttttttggtatatttgaattgttagtattattttttttgtattttggagttagagagaaataagggtaaaaagttagtaaaattaaggtaatttgaagatattatattggttattgttatagttatttaataatttagattgtgaagtgattaataggtggatattgtagatagtagggaaacgttgggtaaagggaggatttattttttgtgggaaggagtaagatggttggattttattacgttaattagaagttaatataattgaaaatttaggaattgtttatttttggaattttttgtttaatatttttagattatagttgattacgagtaattgaaattagggattttaaaattattgatagggggatttattgtttaaaagttttttggaatttatttatttaattatttttttattaggatttatataaatcggtttttttgtagttttatattttttgtgaaataaaataatagatgatttttaagttatgttcgtaagaaatattatatgataaaatattatataatgttaaagaaaaaatatatataatagaaaatttttaaacggttgaagatgattaattatatatatatacgtgtatatatatatatatatatatatacgtgtatatatatatatatatatatatacgtatatatatacgtatatatatatacgtgtatatatagatatatatgtacgtgtatatatatatatatatatagtgtatatatatatatatatgtatatttgtgtgtatatatatatatatatgtatacgtgtatatatatatatatacgtgtgtatatatatatatatatatatatatgtgtgtatgtgtgtatatatgtatatgtatatagtttatatacgtgtgtatatacgtgtgaatgtttgtatatatatatgtatatgtgtatatacgtgtatatatacgtatgtatatacgtgtgtttatatatgtttatgtgtatatatatatatgtatgtatatagttgattatttttaatcgtttggagattttttagtttttttattgttgatttttagttgaattatattgtaaattgagaatatatttaatatgattttaatttatagatattttttgaaatttattttttagtatatagttattttttaattattttatgtgtatttgaaaaattgttttgtatttgttgggtgtaaaattttatatatgttaattagttaaatttattatgttgtttaaatttttttattgattttttttttttttttttgagattgggttttgttttgttatttaggttgaagtatagtggtgtaattgtagtttattgtagttttaattttttgggtataagtaattatttttttttagtatttttagtagttgggattataggtgcgtattattatattaggttaattttttgtatttttcgtagaggtaggattttattatgttgtttaggttggttttgagtttttgagtttaagcgaattattaattttagttttttaaagtgttgggattatatgtgtgagttatcgtgtttggtttttgttgatatttttatttaattgttttattagttattgaaaggacggggggggggaattttaattaatgagtgtgaatttttttatttacgtttttattatatgttgttaatttgtattacgtaattttatttttttttttttttgagatagagttttatttattttgttgtttaggttgaagtgtggtggtgggagtttgtgttttttaggtttaagtgatttttttgttttagtttttcgagtagttgggattataggggtatattattacgtttagttaattttttttttttttgtattttttgtggagatggagttttattatgttggttagattggtttcgaatttttgattttaagcgattcgtttgttttggttttttaaagtgttgggattataggtataagttattatgattggttaatttttattatataatttgatgttgttttattaagggtatacgagtttaagatcgttatatttttttgtggaatttatttttttattttgatagtttaattataatgattttattattatgttatttgattttattaaatgattatatatttaatattataatatagaatatattatatataattataatattatttgtatatattattttttattattataatatttttaattaggtttttattttttttttttttttttttgttttttttttttttgagatagagtttcgttttgtcgtttaagttggagtgtaatggaacgattttggtttattgtaagttttatttttcgggtttacgttatttttttattttagttttttgagtagttgggattataggcgtttgttattacgtttggttaattttttttattttttattagagatggggttttattatgttagttaggatggtttcgattttttgatttcgtgattcgtttttttcggttttttaaagtgttgggattatcggtatgagttatcgcgtttagttattttttatttgttgtatgtggttatttttgtttgatattattatagttatattaattgtttttttattaatattattatggaatagttttttttaaaaaatttttttattttaaatttttttatgtttttgtatttaatgtgggttttatgtaagtattagaatatttgttttaatttaatttgataatgtttttgaagtattgagtttatagtatattaaatgtagttatagatagtattagggttgttatggtttgaatgtttttgtttttttaaaaaattatatattgaaagttaatttttaattgatagtatttggatatgggtttttgggaggtgattaggttttgagaatagagtttttatgaagggaattagtgtttttataaaggcgtagagtgtaaaagttttcgagggtgtgaggtattatagagagtttttgtgaagtttaacgtttagtagagttggggtaggttagtttttttgatttagagtagtaaagtagttagtgtgtgattttagttttaggaagttaggatgtaagttaggtattaagttgttttgggagtagggttatttaaagttgtggagataggtttattatattagtatgtttggaagtgagatatggaattaaagaggattatttttaagatttaagatttaatgttggtcgagcgtcgtggt

SEQ ID NO: 103 - DNA, 5849 bp, Artificial Sequence
  chemically treated genomic DNA (Homo sapiens)
attgtaatggtacgatttcggtttattataattttcgtttttcgggttgaagcgatttttttgttttagttttttaagtagttgggattataggtatgtattattatatttcgttaattttgtatttttagtagagacggggtttttttatgttggttaggttggtttcggattttcgattttcggtgattcgttcgtttcgattttttatagggttgggtttataggcgtgaggtattacgttcggttataatttttaaatatttttttgttggtatttgttcggattatggatttaaatgatttattaatatgatgagaatttaacggggatattttaaaagagataaatgaatatataggtggttcgaaatgattttataaagttttttaataattatatttttttttagagtgttaaagaatttggtttatttaaggtgtttattttttaaaaaatggttatataaatgtaaattttatttaaattaaattttattttgagtttgttaaatgttatgtttagtattatttaaggtttatattaattgttgttttaaaaaattatatagtgttttaagtatttttatattttaaatataaaggaataattttaattgtggaattagagttgtttttttaagataaaaagataaagataaatattataattaattattaattggagaaatatttttttaaacgtttttgtaataattggatgtgttggatagtataattaaatttattaagaatagtgtgaaaaatattattattatttagtttttatatatagatatttttttaaattatcgaaatttgtatttgaatatacgaagtattaagaatttgtttttgaaaaggaaatgaatatttgaaggttattttttttttaatttttttttatattaataattattgttaatatttatttttaaaaaatcgtttttattaggtattcgggaattgtttaataaaagttatttaatgaaattatagtttagataaaaaaaaaaatttaattgtatagaaaatatttatgagtttatttttttaatttatataattgcgtttttgtttttaaagttttgtaatttatattagcgggaataaaaaaatttaatatatagtagaaagttggttttttaaaagaaagtatttttttttaaaggtaatgaaggattaaaaatttttttttttaaaaagattttagaagttttttttttagagaagatagaaaatattgataaatcgtatattgtgtagatgtttagtttcgaaatgtagtttcgtagttttttatttcgtagtttatcggttgtatttgtattttcgggtagcgtttttgtagggcgtaaatatttagagatttagggattcggtagtttcgcgtaggtttttcgcgtgtatcgtttagcgagcgggtttttcgtagacggcgggatgttttaggagatcgcgaggtcggcgtagttcggcgagttttcggagggaaggcggcgtgttagaaaggatcggattttagtaatggtttcggatcggtttcgcgcggtcgtttttttttttcgtttcgtcgtcgggatttttttagttagtgttgaattttttaattgggaaggatcgagttattttatttttcgggaagtcgcgcgtttattcgttttcggtagcgtcggagttcgagtcggggatcgggcggatatttatagagttcgtatcgtagcgcgttgtacgttttcgttttcgttcgtcggttcgcgttttagcgaattaatcgtaaagttggttcgaagtggcgacggcgttttcgtggagtttattcgtcgttttagcgcgttttcgagtagggatcgggtttgtcggggttttcgtcgggttcgcgcgttcgtatggtatttgtcgtacgagtcgttttcgcgtttttttttcgcgttcggtcgtttagttcggcgtcggcgttttacgtttttcgagcgtaggagattttttcgtttcggtttcgttcgtcggcgtcggcgtttatttttcgggcgcggaaattcgagtttatttttttcggttgtcggttttgggatcgcgggttcggttacgtagtttcgttcggatttaaagagttttagtttttgcgaatattaggttcgtgttgggagacgagaaggcgtttagcggggtttagcgcggtttcgaggggtagggcgaggtttgtgatgtcgaggttagttacggttagttataggcgttgtgtaaggaattggggaaagttttttgttaagaaagggaaacgttagtttagttaaaaaaaaaaaaaaaaaaaaaaggttggggtttaatgagaaagttttttagaggtatttttttagtttttttatagttttttgggagtttttgaatttgtatttgaatggcgcggttttgggttcgcgaaggtttggtgggttgaagtcgttttttaggtttttaaaggaatgtagttaggtcggaatttatttttttttttaatttttagaaaatggaaacgtttttttcgcgatttttttttgtcgagttagattttaggtttttttcgtcgcgggcgtttggtttttttcgttgatatttcggacgtttaggtttgtgggataaaaggtagtcgcggcgtttcgcgggttttttagttcgggagtcggttttaggggttttaaagcgtgattttaggtcgataattgtaagtttttaggtagaggggaagttttagcgtcgagaagttcgtttcgagaatttttcgcgtcgggcgtttagtttgagcgtttcgggcgcggagtttattttcggtgcgggtagggttttagtcgtaggttcggcgtagggcggattcggtcgaagttcggagggtcggaggcgttgggacgtagttcggataagagggcggatttgatttcggaaagtttgtgggatttaggtattttaatattgggaagataaagagattcgatttttttgggattggtgaggggagtttggcggggaggggaacggtagggtagttaagtgtgaaagagaattttttgggtttaaagttaacgtagttattttataagttattttagaggtgatcggaaaaaataataataataaaggtgtttagtaggttgtggttgggaaggaaaaataatgtttgtaagatgagtgtgtcgattcgtagttttatattttttgtttattagttggaatatatatagatttatatatttagtaaatgtaaattttattatttaaagacgtgtttgtttcggttataattgttttaagtgtttataggttaattttatatatggaatatttcgaaagtgggtgatttgatttttaagtttaatcggtttgtgtcgtttgtcgaattgtaaattttagtaaaatttaaatatatcggaattttagtcgttttttgggagcgaggaagcgggagtaatgttaaaaggggaaaagaagaatagtaaaaaaagtataaagatattattttttgacgtaaaattacgggattttttttaaatggtataagagaatttttggagaagattattattaattaataagtaataacgttttttagggtttattagatgttttatatttgtttgggaatttcgattttttaggttttttgagaaatttatttgtttggaagaagttgtatttcgtcgttataggagtcgtcgagagttagggatggagattttagatttaggattttgttacgattttattgatttttaagcgttaatagaacgaaatggatatgtttattagttattataaatcgaattattttatatgagagagagaaatgtggtttaagttttatatttgttttttaaataatcgattttttttaattttgtttttaaaggttcgtggaaattagggagggggttggggagacggttttagaaataaaacgtttttttttagtacggtttttatatttagtttatttaagttgatttttgtaatttatataaagaatgggttcgggtgggtggttagtgaagattggggtgagtaagcgtttacgtcgtcgagcgtcggggaggtttaggttcgttttcgtatagaattttgtaaggagcgcgtttcgttaggtgttcggattagagggcgttgcgtttttgtaaatttcgcggtttcgatgcgttttttttaggtattattgttataataagttatatttaaaataatgtataaatagtatcgttttttaagttttttttaatagtgttttatatgtattttatgaatttttaaagttatgtatacgaattttttatcgtcgattcgtataaagttagagggatgcgtagtttttggagtcgagaattcgtagggcgtatacgttttttcgtattcgtttagagttatatattttacgtaattttattaacgtttaaatttaaatgttaaaaggtatgtacgatttgaataaagaatttattagtttagtcgagttttcggttttgggttttaaagttttcggtagtttcgtgattttttcgcggtgtagatatgtgttaagagtcgggtttgaagtattaattttgttttttcgggatttttagtatgtttttaattagagtgttaacgttcgtgtcgtcgggatttaggcggtcgtattttcggaggttttcgattagggtaaatttaagtattaaacgtaggcgaaaagagagtgcgcggggtcggaacgagggttcgggagtagttaagtttgttaggacgtgtttaggtagttagtcgtcgagttgaggagttgcggtcgtcggttgcggcgattcgttgtttttttttttatttttttttttttggaggcggtgggggaggggaggtgacgttagcgtttcgtttcgtttttcgtttcgggcgcggacgggatttttcggttgggcgcgttatttcgatagtggtagtagcggtcgtggaggttgcgggggtttcggtttttgcggtttttttggtcggtcgtagttgtggcgcgggtgaaacgttcgtttttttttttcggttgcgtttttcgggcgtcggcgagcgcgggcgtttttcgtatttagcgtttggagtcgtttggagtttcgttgcgcgtattttttcggttcgcggagttttttcggcggcgttttttacgtcgcggattgtaggtgatgtttttttttttttgtagtcgaaattcgtcgcgatgtgtcgtttgttagatttttgttgggcggaagtatgaatagtttttgtagattggtttggacgatttgtattttgtggttttttaatttttggatgtgaatttttttttacgatttattattatgtttttcgtggtttttgtgttgaaaattacggagttgtatttttatttttaaatttttttttaatgttttttttgttttgatcgtattttgaagtttataaggttttgagaggagggggcgaagggataggggaggagttagtttttaatgtgttttataagttatttttagtgataggggttaatacgtaaattattgtttttttttcgaaataatatttatttagataaatgtaaatattgttgaggtttaatttataaagaatgcgtcgtttttatgtaagtgtttagtttttaggaaaatatttgttgtggaatatatttttaatgttattaaagtattaaaatattttttcgaatagcgtgaaatttcgagggagttatttttgtgagttgatattgtttttagaagattgttattaatatttaagatttttgtaaaagggggttgggggcggttttattatatttgtattcgttggtataaatatgttgattagtttagttggtcgttttttta

SEQ ID NO: 104 - DNA, 5849 bp, Artificial Sequence
  chemically treated genomic DNA (Homo sapiens)
taaaagaacgattagttaaattgattaatatatttatattaacggatgtaaatatgatagaatcgtttttagtttttttttgtaaggattttgaatgttaatgataattttttggggataatgttaatttatagaaatggttttttcggaattttacgttgttcggggaggtattttggtattttagtggtattaaaaatatattttatagtagatatttttttggaggttggatatttatataaagacgacgtattttttataaattaaattttaatagtgtttgtatttatttaaatggatattatttcgaggaggagatagtgatttgcgtattagtttttattattagggatgatttgtaagatatattaggaattggttttttttttattttttcgttttttttttttagaattttataagttttagagtacggttaagataagaggagtattgggaaagaatttgaaaataaaaatatagtttcgtgatttttaatataaagattacgaagagtataataataagtcgtgaaaaaaaatttatatttagaagttggagggttataaagtataagtcgtttaggttagtttgtagagattgtttatgttttcgtttagtaaaaatttggtaggcgatatatcgcgacgaatttcggttgtagaagaggaagagtattatttgtagttcgcggcgtgggaaacgtcgtcggaggggtttcgcgagtcggggaagtgcgcgtagcggggttttaggcggttttaggcgttgagtgcgaggaacgttcgcgttcgtcggcgttcgggagacgtagtcgaaggaggagggcgggcgttttattcgcgttatagttgcggtcggttagagagatcgtagaggtcgggattttcgtagtttttacggtcgttgttgttattgtcggggtggcgcgtttagtcggagaatttcgttcgcgttcggggcggggggcgaggcggggcgttgacgttatttttttttttttatcgtttttaagggggagggagtggggaaagaggtagcgagtcgtcgtagtcggcggtcgtaattttttaattcggcggttggttgtttgggtacgttttgataaatttggttgttttcgggttttcgtttcggtttcgcgtatttttttttcgtttgcgtttggtgtttaagtttgttttggtcggaagttttcggagatgcggtcgtttgggtttcggcggtacggacgttggtattttggttagggatatgttgaagatttcggggaggtaaagttggtattttaaattcggtttttaatatatatttatatcgcgaggggattacggagttgtcgaggattttagagtttagggtcgaggattcggttagattggtgagttttttgtttaaatcgtgtatgttttttggtatttaagtttaaacgttaatgaaattacgtggggtgtgtggttttaagcgagtgcggggaagcgtgtgcgttttacgggttttcggttttaggagttgcgtatttttttggttttgtgcggatcggcgatgaaagattcgtatgtatagttttgggagtttataaaatatatatagagtattgttaaaaagaatttgagaggcgatgttgtttgtgtattattttgaatgtaatttattatagtaatggtgtttagggagggcgtatcggggtcgcgagatttgtaggggcgtagcgttttttagttcgggtatttggcgaggcgcgttttttgtagggttttgtgcggaggcgaatttggattttttcggcgttcggcgacgtgggcgtttgtttattttagtttttattgattatttattcgggtttattttttatatgagttataaaaattagtttgggtggattggatgtagaggtcgtgttggaggaaagcgttttgtttttggaatcgtttttttaattttttttttaatttttacgagtttttggggatagggttagggagggtcgattatttaaaggataaatgtggaatttgaattatattttttttttttatataaaataattcgatttgtggtagttaataggtatgtttatttcgttttgttggcgtttaaggattagtagaatcgtggtagagttttaagtttgaaatttttatttttggttttcggcggtttttgtggcgacgaagtgtaattttttttaggtagatagattttttagggagtttggaaaatcgggatttttagatagatgtaaaatatttagtaagttttaggaagcgttattatttattaattaatggtaattttttttaggaatttttttgtgttatttaaaaaaaatttcgtgattttacgttagggaatggtatttttgtattttttttattgttttttttttttttttttagtattattttcgttttttcgtttttaggaaacggttggagtttcggtgtgtttgggttttgttgagatttataattcggtaagcggtataagtcggttgggtttggagattaggttatttattttcgaggtgttttatgtatgaaattgatttgtaagtatttggagtaattatggtcgggataaatacgtttttggatgatggagtttgtatttgttggatgtgtgaatttatgtgtattttaattggtgggtagggaatatagggttacgaatcggtatatttattttgtaggtattattttttttttttagttataatttgttagatatttttattattattatttttttcggttatttttaagatggtttataaggtgattgcgttaattttgaatttaggaaatttttttttatatttgattgttttgtcgttttttttttcgttaagttttttttattagttttagggaaatcggatttttttgtttttttagtgttaaaatgtttgagttttataaatttttcgagattaagttcgtttttttgttcgggttgcgttttagcgttttcggtttttcgggtttcggtcgagttcgttttgcgtcgagtttgcggttggagttttgttcgtatcggggatgggtttcgcgttcgggacgtttaggttgggcgttcggcgcggggagttttcggagcgggtttttcggcgttggggttttttttttgtttaggaatttgtagttgtcggtttggggttacgttttggggtttttggggtcgattttcgggttaggaagttcgcgggacgtcgcgattgttttttgttttataggtttgggcgttcggggtgttagcgggggaggttaggcgttcgcggcggggagggtttggggtttaattcggtagaaaaaggtcgcgggggaagcgtttttattttttggggattgaaggaggaagtagatttcgatttagttgtatttttttggagatttgaaggacgattttagtttattaaattttcgcggatttagagtcgcgttatttaaatgtagatttaggggtttttagaaggttatggaaaagttaaagggatgtttttgggaagtttttttattaggttttagttttttttttttttttttttttttagttaagttaacgttttttttttttggtagggagttttttttaattttttgtatagcgtttgtggttggtcgtaattaatttcggtattataagtttcgttttgtttttcggagtcgcgttagatttcgttgggcgttttttcgttttttagtacggatttggtgttcgtagggattggggttttttgggttcgggcgggattgcgtggtcgagttcgcggttttagagtcggtagtcggggaaagtgggttcgagttttcgcgttcgagaaatgagcgtcggcgtcggcgggcggggtcggggcggagggattttttgcgttcggggagcgtgaggcgtcggcgtcgagttgggcggtcgggcgcggggagagggcgcgggagcggttcgtgcggtaggtattatgcggacgcgcgagttcggcgagggtttcggtaggttcggtttttgttcgggggcgcgttgagacggcgggtgagttttacgagagcgtcgtcgttatttcgggttaattttgcggttagttcgttggggcgcgggtcggcgggcgggggcgagagcgtgtagcgcgttgcggtgcggattttgtgggtgttcgttcggttttcggttcgggtttcggcgttgtcgaaaacggatgagcgcgcgatttttcggagggtggagtgattcggttttttttagttgggaaatttagtattggttaggggggtttcggcggcggagcgggaaaaggaggcgatcgcgcgggatcgattcggggttattgttggggttcgattttttttgatacgtcgtttttttttcgggagttcgtcgggttgcgtcggtttcgcggttttttggggtatttcgtcgtttgcgaaagattcgttcgttgagcggtgtacgcgggaggtttgcgcggggttgtcgggtttttgggtttttgggtgtttgcgttttgtaggagcgttgttcggaggtgtagatgtaatcggtggattgcggagtgaagggttgcgaggttgtatttcggggttgaatatttgtataatgtgcggtttgttagtgttttttgttttttttggaggaggaatttttaagatttttttaaaagaaagagtttttggttttttattgtttttaaaaaaaaatgtttttttttagagagttagttttttgttgtgtgttagatttttttgttttcgttgatgtgaattgtaaggttttggaaataaggacgtaattgtatgagttaggaaagtaaatttataaatattttttatgtagttaagtttttttttttgtttgaattgtggttttattaagtggtttttgttaagtaattttcgggtgtttgatagaggcgattttttaaaagtggatattaatagtgattattagtatgagaaaagattgaaaagaaaatgatttttagatatttattttttttttaaaagtagatttttaatgtttcgtatatttagatataggtttcgatagtttaagaaggtatttgtgtgtgagaattaggtaatggtgatgttttttatattatttttaatgagtttggttatgttgtttaatatatttagttgttatagggacgtttgaaaaggtgtttttttagttaatagttaattgtgatatttgtttttgtttttttgttttaggaagatagttttgattttatagttagaattatttttttgtatttaagatgtaaaaatatttaaagtattatgtaattttttaaaataataattggtataagttttgagtgatgttaaatatggtatttaataagtttaaggtaaggtttgatttgaatgaagtttgtatttgtataattattttttgaaaaatgaatattttaaatgagttaaattttttggtattttggaaagaagtgtggttgttagaggattttataaaattatttcgggttatttgtatatttatttgttttttttgaagtattttcgttgggtttttattatgttagtagattatttaaatttatggttcggataggtgttaatagaaaaatgtttaaaaattatggtcgggcgtagtgttttacgtttgtaaatttagttttatgggaggtcgaggcgggcggattatcggaggtcgggggttcgagattaatttgattaatatggagaaatttcgtttttattaaaaatataaaattagcggagtgtggtggtgtatgtttgtaattttagttatttgggaggttgaggtaggagaatcgttttaattcgggaggcggaggttgtggtaagtcgagatcgtgttattgtaat

SEQ ID NO: 105 - DNA, 12201 bp, Artificial Sequence
  chemically treated genomic DNA (Homo sapiens)
taataattgtgtagttatcgttttcgtacgttgttaataaggtagatagatgtagaggaaacgtttttataattttttggaatgtagatacgaagcgtaaattgaatttttggtagatggtagaaaaggtgatttgataatgagtttgaaataattaaagtgatatttttatttatttatttttataattttatttatttcgaggaaagtttagaggattggaatatggatataaaggaggataatttaagattgtaagttttatttttcgaaaggttgtatttataagtaggttgttagaggttgcgtttttttttttattttttgtatttaggagtttggaggattttgttgtttatttttcgttttacgttaattttatgagatagggatatcgtcgttttttgtttagtaattttcgggttgtttgattattattttttaggttagcgattggatttattttttttttcgcgtatttacgggtaatcgaggttattcgaggttttggtttcgaacgaatttgagtagcgagagatttataataaagaattaagtgtggttttttaggggttgcgttcgttatttagggattgaaagagatttgcgggatgattttttgtttttttttagtaggaattagaataaggggcgtagattcggtttaatttttttgtttcggttaatgggaagatgaaatagaaaaatttttttttattcgtaatacggagatttagggggttgtttagttagaaggttggtaaattgtaaaacggcggggtagggggttaaggggacggttggggtttttttgtttagttttttttttattttaggatttaggttaggttaaatttttagcgtcgtgtgtgtttgaaagtagataggtgggatttttggaaagaatatatataatatagtttttgagttttagaaggattttaagataggagtttttgagttttgaataagaggttatttagggtaaagcgattgattttcgcgcggtgcggttgagaagagaaggcgttgttgatttttcggggagtaagttaataatttagtcgagttgatgaagtgacgttttttttgaaaggggtcgttttttgggtttttttttttagtcggtatttagtaggtagggaggtagggtaaatttttttttttacgtgaagttataaagaattgatgagttttaatagtatggatttgaagtcgtagataattttaaatatattcgcgttagagtttatatttttgtttatttttgcggagttggagtagatagcgatttttaaaattgtttttaaaatttttttcgaattgatcgggtatttattgggatttgaggggtttttttttagtttttaaattattgttatatgtagaatatattggtagatgttattaatgattgtttatttttttttaaaagttgtttcgtttacgtattatttagtttatattaaattgtttcgatatgttttagtcgttagtttaatttataaagtagttgtaatttttgatattattttcgtagtttattcgaggatttttttttaggatattttatgaggttgtttttcgagggttgaattttgagatttaaaggaaggttatttgaggtattttggtatattttcgggtttttaatttttttttttgtttggttggtaattttttgttgttttttttttttttttatttgatttttttcgaggtattttcgttttttttttttcgttcgtttttagtaaatttttagcgggtgggggaaattaattttttggcgttaaagttaaatttagagttgttcgttggataggattgtagtggggtaaatggtgttcgtttttttagaaagaatgattaattatatggaggtaatttgttttgggttttttgagatttcgggcggattcgttcgtgttttgttagatttagtgtaaatgtagattttagttgaatcggttaggatttgagagatagttgttttatttttcggattgtaattattttcgcgagaatttgatatatttaatgaaagttttgttaaatgtacgggttagcgcgtttttgggttattattatttgggttagtatattgtatttattagcgttaatttgggttttacgtagtagaattcggttaaaaatcgtttgtttttggttatttaggagttttagggggtagggggaagtaagaaaaaggttttatttgatattgttagtcgtttttgataagttatagtaaatatttttagaagtataattttaaagggagaatataaattttcgttttcgtttggtcgaacgtttttttgtaattaattgcggattttcgtatgtttaggattgaattgaggtttgtggtttcgtagttgtttcgatgtcgggagtatgaaattttatttcggttgagaatcgagtaatagatcgtataagaacggtgttttttggtttgtcgtttgttaagaaatattaggaaagttggtgttagaaataattatttgaatttagaaagtaaggttaggaagttttgcgtgtagagaaaatttttgttaatttatttagattgttttatttggttaataaagtaattgatatttaataaaattataatcgtagtaggagttttaggtattagaataagaattataattaaaggtttgttgttgttaataattgtttttattattattgtttagtatttttttaagtaaaaggaaagaaaaagagaattattttatatttattggtattttttttttttttttgaaattagagtatagatttttttgattgttttttaataagttattattattaacgggaagagacgtaaattggttttaaatatttatatttcgttcgcggtggaatataaatggttaatcgtaattttttttaaacgtatataattttatttgatttttggatatgattaaagatattgaggatttatatagttttattttatattattagagattatatagaaaagataaaaacgggaaaggggatatatacgtatttatttaatatttatttttagaggtaaataaaatttttttgttttattttggtttttaaattatatgatgtggatattagaaaatataaattttttagttatatatatttttttatttgaatattttatttagtaaaattggtagtgtaatttattttatttttttaaatttgattttgatgtgagttaaatatatagtattatttttttgggaataaatttttaaatttatatttttattggaaagttgattaaagttttttttttttttttagttttggttagatgagaaggaataagttgttttattgtttgtgattttttaaagaaataatttaaaatttatttatatttgttagaggttattgggagataaataaatgttaaatgtgtaattttattttttaattgtaattaaaatttatttagatttttgaaatgtagtttgagagtatgatgtttgtgtaggaatttgtatttgatattaagtttgatgtggaatgtttaaatggtaattaaagtagagaaagtaatagtatataaaaatataagtttaagagtttattaggaggttgggtgtaatagttatattttggaaggtgtatataagggtatatgggtagatgttatagattttagaggaatttaaattttagtattttttttatattgaaagatattgttagatatattgaggtagtttggaggtgatggggattatatttaataattatttatattttttatttttttagtaaaggaattaaattagagatttatattattgtcgtttttaaggatatatttttgatttaataatatataaaggttaaaacgagtttttttttgagaggagagggtttaattttcgttttgaatataagaggtcgtttttgtgattaagtattacggataaattgtttattagttttatgtatataaaattttatagatatatttgatgtattaaatttatatatagtaattagttgaggaaattataataatttatgattaatttagaattttaaggtaaagtaaaattataaagtttgttattttaatttggattttaatgtaaaatgtgttatgatatatgtattgaattttagagtatgtttattatggtggggttttttaaacgtttttttttaatgttggtatttttattatgcgttttgtttttattagtttaggaatttattaagaaaatatttgtttataataatggtgtagaatgaaaagaggaaaatgttgtttttattattaaggtgaaattgtttattattaaaggttttttttaagtcgtatgtaagtttttttatttggaagtgttattatttgtaataattttttgtaatagtttattggtttagggagttaaaatattatattgtgggtgggaggtgggggttggtttgaaggaggatggatagtgagggtgttttgtggattttaaatgtaagttattaggtttttggtggtttttggtgtttaattttattttataaaagtggtatgatggaatatgattaggtaaaattttattttttggtattgtggtggtatttttttttttttttttttttattagggttaatatgtttatttttatgggaaatatatataaatattaggaagatttgtttcgtattgagattaatagtattagttttgtaaaagtagtttgataaaaggttttatatatttaatattagagattagaaatagattaaaaaaaaaaaaaaaaaaaaatatatattatataattggtaaatttattaatttaggtttatttaattttcgtttttatatacgcgttttaaaataatttataataaaaatggaagggaagatagatttaatttgaaattttttttgagaaaaaataaattaaaattagtttttggggaagaaagttttagttaggttaggaggaaatttacgtatttttgatttttttttcgttttggagaggtattattcgtttaagtttagttaatgcggtcggttaggatttatagtttttattaagggttagattttgcgaaagatataaagaaaggagttttttaatatatcgggtttttttatagtaataagatatcgaaattaagttttttatggtttgtgtttgtaggattttttagataaaattggtagttttattagataagaaatggttttttagaagttttgggggaagcgcgggggtttttcgtggtttttttgtgattgtttttgggagatcgtaatagatgatgggaatatgtaagaatgattgaagaaggttatcggcgagttgtatttaatagttttttttttttaagtagtttttcgagagaaaattatatattaacgtttggggacgtgaaataggttttttattgttttgtaataaatttttttttattcgcgtttttagattaatgtatttttaaaaaatttttataaagttatggagatttgtttttataattattaaaatattatagttagttgtataagtttgtttaaaaataaagggtaggagattagtagtgagaagaattgaatagtatataaaaattttataaattttagattattgaaagattatttcgttttttggtttcgggttagtgagttttaattttagagttaaattgagaagtagatttcgcgggtttgaaagataaaaagttagttcgcggagttaatttcggtttatcggtgcgttttaatttgattgttttaatagtaagaagcgtttttttttttttatttaacgtttttagatatttgaggttgggggagacggagtaatggtgtagtagttaggaaatagtttttttgggtttaattattttattttcgatttttttttttttagcgcgtcgagcgtagttagttttggaggaattagtttttcggagtagttaaggtaggttaggtttcggggatgtgtattacggcgtggggattaaattaagttgaacggtttgttttaagtttttttttttttttagagttcgggagggatttcgttaataggtagatttatttattagttattcgttatcggcggtagaaagtgagtttcgcgcgtaacgcggttagtcggattgcggggattttaggagcgtagggcggaggagtagcgttataggaggcgagggcgtaggcggcgcggtcgggaaggaacgcgggaggggatagaaggaagaggaagaggaggagagggaggttagagttagaatagttcggtagttcgagtttcgggggagaacggtttgagtttcgagtaagttgtttcgggagttttaattttttttcgttggttcgtcgagcggttagtggcgtttagcggcggcgaggttgaaatatgataattagaatagttgcgtcgcgcgttttgtagttaatgggcgcggcgttcgtttgacgttttcgcgcgttgcgttagattaatggcgatggagttgagttggagtagagaagtttgagtaagagataaggaagagaggtgttcgagtcgcgtcgagtttgtcgtcgtcgtagcgttttcgtttcgttaatttcgtcggtttaaattggatttttagattcgcgagggcgcggcgtagtcgagtagcggtttttttagtattggtaattttaggggttaatattttttatttagttatagttttagtattttttttgtgggttgtttattaattgtataattattattttattgtggatattatttttttttatagatatgggagatatgggagatttattaaaaagtaagaggttattttattttgtggggttcggtgtgttgtttttgtgcggggtttttttttaggtataggttgaggtgttaagggttttttggagttggagttattgtttggagaaagagaaaaggtggtttttttttgttgtcgttacgtttgtatgtttattgtcggtttttattttcgggaaattgattgtattttgtgtgtgaattcgtttgtgtgttttttaaagttttagttttttggtgttaagcggtgatttttttttggggaattttgagtttttcgagaaggttattatgttgtaaaggtttgtttgtatagttaatgtttagagatgtgaattagtattagatttgtaaaagagaacgagtgataattgtatttatgtttgtttttgttaataatatttagttttgtgtgttatttaagagcgcgttttacggaaaatatagatatttttgcgtttatttaacgtttttagttaaaattttttttttgatttgatttatttataattttttttaatgattatagtaaagaggaaggggggggggagaaatataaaatgagcgggtttgattgcgtgttaggcgtataaatgtagattattttaatttgtattttatatatattttatttttttttaaaaatgagttaaggttttgatggtatattttaattattattttaaagtgtaatgttttaaaaaaaaaaaaaaagaaagaaagaaagaaagaaaaaaattttttagagtacgttttataagagaacgatattaaaagtgtgtttatttttgtaggaagtaaacggttagttaattatgtatttatttttattttagaaaaacgtttgatttttttatgtgttggttgcggtaattagatttacgattagtatattttgagggttttttcggatttggaatggtatgcggtatgtttgaaatgtgcggagtgtaattagtatttggacgagagttgtatatgttttgttagggatgggaaaatttattgtaaaagagattatattaggtatggtatttatattttttttttaattttgtgggatttttttgaatttttttattttttatgtattatttggtgtggttttgtttttttgtgaagtttgttttagtgtagttatataagttaaagttattttgtatatgtgttaaaaaaattaagttatgttgtttattttattttttagttgagaaaaataaaaatttttaatagtggtatttataatttcggggtattgaggtttgtttaattatttttggagtttatgatgtataaattattttttttttttatttttttttttataaaataaaattttaaaaagatggagaagtttggatttttagttttaaaatagggttgatttttgttgtatagtgtagtgttttgtttgttttagttttttttaaaattagtagtttataaattttttggtggtattaatgtaataggtgaaataaaagtttgatcgaagtatgtttagagatgtattttgaaagagcgagtataggtattgttttttttatttttggggtaagatttttttttgagaaaaatttaaaattaatttaaatattttttggaaaaaatatcggaaatttaatttttttaaatattaattttttggtgatatttaattgtttttttttttttattttatttgagttgatgaattagagtagattaaattgtttattatttgtttacgaataattggtatatttagataattgaatagtttttttttttatattaaaatttggtaattgataaaatgagcgaattgtttaaattgataagattgaaataatataggaattttttgagtttggttttgttgttttggagagtttttgtttttttttttttttaatttattttgtaatacgttttgttaattttaagttttttttgatttgtgtgtatgtattagaaattttgttttttgttttagaaagttagtagtttttaaagaaaattgtatttattttattaataaatagaagagatattagtattattattatgttaaataatagtaaaatattattttttaaatgttcggtggttattaataagtaattaattagtttttgttaggtaaatggtttttggagtttgagaatttttattaaagtttagttaagatttaatatatagttatagtttgtttttgtttatttagtatttagtatttttttttttttttttaaaaattatgatatagagagtataattttggtagataaaattaatttggttgggggaggttaatatttcggagagggagtgaaaggaagtaagggaagtcggggtataggaagggggagggattttttaaattgtttggttatcgttaaagttaagtttttattttatgaaatggaagattttatattgagtaggcggagggaggaaaaatttttgagtttattttttaatttttgataaatgagcgtttttattgtttattagattggtgtgtaaacgtaagattttagagaaggagagtttattttaggagtatttttattgttatggaaatagtattttgtttaattgtatataggtttgtatgtgtttaattttggatatatatatgtgtagaaggaattaattatttttattttttttttatttttttttaattttgtgtgtgtgtgtgtgtgtgtgtgtgtgtgtgtgtgtaattttgtagttgtaaaagtagaatagattggatagttagatttttatatttttttttggagaagtaggatgtttttttttgttatgtggattttttttttttttttttattttttttgttcgtaggaatgttttagtttttgttatttttgaaagatggagaaggggttagggaagtgtagtttagatggaatttataaagattgttttttggtaaggaaaggttaggagtgagaaagattttagaagcgggtttttgtattttttttattttggttatggtttttaagaaaattgaaatgaggtagatgatttagtaatttgaaaaagattgagggaatagacgtagatttttttaaaaaaataataatataaggaagaatggagaggaaattttttgttaatattgttgtttgaagaaaatttttagttggagaaagattggaaagtatttgtgtaaaaggagatgtggaaatttttagaggttttattttgttattttgtttgtttatttgtgagtgtttgtaaatcgagtggggtgataattttttttttttattttttttttttttggaaggaggattttttgttgtagttttagatatttttagtagtagaaattgtgggatagggaagtgaaagtgttggtgtcggtggttattagagtttttttggatttttttttgttaagatttgtaagattaatattgggattgattgttagagtagtagttcgagtttggaatttattaatatattttttgtggtataagttaggtgttttgagttaagagttattaattaagatagaggtttatcggaaaggaaacgggagtaaaagaaagggaggagggagggaggggaaaagagagatgggggaaggaagagagatagggaaggagagagtagggttttatttttgtttttttgtttttaatttttgtttggaaatgttgtttatttggggcgttttgttcgggattttgggttagggaagtgtcggtttgaagtgattttttttttttgtattttttttttcgttttgggtcgttttcgtttttttttttttcgtataggttgtacgggattaaatgcgttaagtgtagtatcggttttagtaagaacgatttcgtgatgcgtgttcgttttaaggtgtattatatcgagtgttttcgttgtgtggtttgtagtcgttagtttatttttggggacgaatttgcgtttcgggaggacggttttttttgtcgagtagattacgatgtggtggagagggttagtttaggcgttggcgattcgtttagttttttgtatttagcgcggttattgtaaatggtaggtatttttttgttcggttcgggtaggtaggcgttaggttaagttagtttgtgtgttagcggttataataattatggtagttataggggtggtcgtagtgtttgtttgtagttaaatgaagtgttttgtatgtaatttgcgttgtgttttgtttttttgtagtaaggtttaatgtatttattgttttttttgatttttcgagtatatttatatcgtttgtgtgtttttatatggttatatataaatgtatattatttgtgtatacgtgtatatatacgtttaaatattatttttagttcgttttggtttttaaattttggtttgttgaaaacgggttttagtttttagttaggtatttttttgttgtttaattaaaggggcggagtttcgggtttttggagttttattttttaatttaatgaaggaagtttaggtggtttgaagttatttagttttttaaattttttttttttgtgagttgttttatattcgaaattttttttttaatttttttatttttttgtgagagaataggattgaaaagatatagttttaaaaattgtaggttattgtatagagttgtaatataaaattgttaataagtttatttgtagtaattgttttttaaagggagtttgtttttttaaattatttattttatatgatttggtgagaattttatttttaggtttatggttgtagttttaaattgattttataggtgttggtttgattttagggggttgtagaaggtgtaggatttgtattatgtagataagaggatttatttttaaggaagaggagtggaaatatagtaaggttggtcgggattaaagtagtgggttagaaggtggatagtgtttttaaatttgattttttgttatgaatagatttatttttttgtagttttaaagtattaatttttattaaatattgaaggtgaggaaattatagtttttttttatttttttgttttttggtagttttaagaattttgtttagggggatttgtgattagtttgtatcggggtacggttggggtggtgtttttgtttagtggagtttgtattttgtttgtggggaagtatagaggaagttaaaatatcgagagggaggcgggggatattttttagttatcgtttatttagagtttaggtagtttaatagagttttcgttttttattgtttgggattagtttattttaggaatatttatgtattattttagatttaatattaagagtagggattggagatatggtagaaatagcgaatttttttagtttttttatatgattgttttttcggattgaagtttaaggcgttttggtagagttttcgattt

SEQ ID NO: 106 - DNA, 12201 bp, Artificial Sequence
  chemically treated genomic DNA (Homo sapiens)
aggtcgagaattttgttagaacgttttgaattttagttcgagaggatagttatgtgaaggggttgaagagattcgttatttttgttatatttttaatttttgtttttagtattaaatttaaggtaatatatggatgtttttgagatgggttgattttaagtagtggaaaacggaaattttgttgagttgtttaggttttagataaacggtggttgggagatgtttttcgtttttttttcggtattttagttttttttgtgtttttttataagtagagtgtaggttttattgaataggagtattattttagtcgtgtttcggtgtaaattagttataaatttttttgaatagaatttttagagttgttagaaggtagaagggtaagggagggttatagtttttttatttttagtgtttagtgggaattgatattttaaaattgtaaaggggtagatttatttatggtaggaagttaggtttggaaatattgtttattttttaatttattgttttggtttcggttaattttgttgtgtttttattttttttttttgggaatgagtttttttatttatatgatataaattttgtattttttataattttttagggttaggttaatatttatggggttaatttagagttataattatgggtttgaagatgaaatttttattaaattatatagaatgaatgatttaaagaagtaggttttttttaaaaggtaattattgtagataagtttgttgatagttttatattataattttgtgtaatggtttgtagtttttaaaattgtatttttttagttttgtttttttatagaaagataaaaaaattaaaaaaaaaatttcgagtgtgaagtaatttataaggaaaaaggatttgggagattaaatgattttaggttatttaagttttttttattgggttaaaggatgaagttttagggattcggggtttcgtttttttaattaggtagtaggagaatatttggttgggagttgaagttcgtttttagtaagttaaggtttggaggttagagcgaattggaagtaatgtttgggcgtgtgtatatacgtgtatataagtggtgtatatttatgtgtaattatatagagatatatagacggtgtaggtgtgttcggggaattaagggagatagtgagtgtattgaattttgttgtaaaggagtagagtatagcgtaaattgtatatagaatattttatttaattgtaggtaaatattacgattatttttgtagttattatagttgttgtggtcgttggtatataggttggtttaatttggcgtttgtttattcgagtcgggtagaggagtatttgttatttgtagtggtcgcgttggatgtaggggattgagcgggtcgttagcgtttagattggttttttttattatatcgtggtttgttcggtagaagagatcgttttttcgaagcgtaaattcgtttttagggatgagttggcggttgtaggttatatagcggaaatattcgatgtgatatattttggagcgggtacgtattacgaagtcgtttttgttgaagtcgatgttgtatttggcgtatttgatttcgtataatttgtgcgggggaggggggagcggaggcggtttagagcggggagagaagtataggaagagggggttattttaggtcggtatttttttggtttaagatttcgggtaagacgttttaagtaaatagtatttttaaatagaagttggaaatagaaggatagaaatgaaattttgttttttttttttttgtttttttttttttttttatttttttttttttttttttttttttttttttttttttattttcgtttttttttcgatgaatttttgttttagttggtaatttttagtttaaaatatttagtttgtattatagaaaatgtattgatgggttttaaattcgggttgttgttttagtaattaattttagtgttgattttgtagattttggtaggaaggaatttagaaagattttggtggttatcgatattaatatttttatttttttattttataatttttgttgttagaaatgtttaaaattgtaataaaaagttttttttttaagaaaaaaggaggtaggagaaggggattgttattttattcggtttgtaaatatttataaataaataagtagaataataaaatgaaatttttgagagtttttatatttttttttgtataagtattttttagtttttttttaattaaagattttttttaggtagtaatgttaatagaaaattttttttttatttttttttgtattattatttttttaaaaaaatttgcgtttgtttttttaattttttttaagttgttgaattatttattttattttaatttttttgaaaattatgattagaatgaaaaaaatgtaaagattcgtttttaaggttttttttatttttggtttttttttattaagggataatttttataggttttatttaggttgtatttttttggttttttttttattttttaggaataatagaagttggggtatttttacgaatagaaagaatggaagagagaggaaaagatttatataataggaggaggtattttgtttttttaaggagagatgtggaaatttaattgtttagtttgttttgtttttataattataagattatatatatatatatatatatatatatatatatatatagagttgagagagagtgaagagaaggtaaaaatgattagttttttttatatatgtgtgtatttagaattaggtatatgtaagtttgtgtgtaattgagtaaaatattatttttatagtagtaaagatatttttgaagtgggttttttttttttagaattttgcgtttatatattaatttagtaaataatgaaaacgtttatttgttagaggttagaaggtggatttaaaagtttttttttttttcgtttatttaatgtgagattttttattttatagggtgaagatttgattttggcggtgattaaataatttagaaaatttttttttttttttgtatttcgattttttttatttttttttatttttttttcgaagtattaattttttttaattaggttaattttatttattaagattatattttttgtgttatgatttttaaaaaagaagaaaaaaatgttggatattaagtgagtaggagtaaattgtgattgtatattaaattttaattaaattttaataaaagtttttaagttttagaaattatttgtttaataaaagttaattaattatttgttaatagttatcggatatttaaaaagtgatattttgttattatttaatataataatgatgttgatgttttttttgtttgttaataaaatgaatataattttttttagagattattggttttttaaggtagaaaataaagtttttgatatatatatataagttagaggaaatttgagattagtaaaacgtgttgtagaataaattggaggaaaaaaaaaataaaaattttttaaaataataaaattaaatttagaaagtttttatgttgttttagttttgttaatttggataattcgtttattttattagttattagattttaatgtgagaaaggaagttgtttaattatttaaatatattaattgttcgtagatagatgatgggtaatttgatttgttttaatttattagtttagataagataagaaagaagagatagttagatgttattaaagggttaatatttaaaaagattaagttttcggtgttttttttaaggaatatttaggttggttttaaattttttttagaaggaggttttattttaaaaataaaaggagtaatatttgtattcgtttttttaaagtatatttttaaatatgtttcggttaaatttttattttatttattgtattgatgttattaaagaatttgtaagttattaattttaaaaaggattaaaataaatagaatattgtattatataataaaaattaattttattttaaagttaaaaatttaaatttttttatttttttaaaattttgttttgtaagggggagggtgaaagaggaaaataatttgtgtattataaattttaagagtaattaaataagttttaatatttcggaattatgaatattattgttaagggtttttgttttttttaattaaagaatgaaatgaatagtatagtttgatttttttaatatatgtatagggtaattttggtttgtatgattatattgaggtaaattttataaaaagataaagttatattaaataatatataaagagtggggagatttagggaaattttataaaattaagaaagaagtgtaaatgttatatttgatataattttttttatagtaggtttttttatttttaataaagtatgtatagttttcgtttaaatattgattatatttcgtatattttaaatatgtcgtatgttattttaaattcggagaaatttttagaatatattgatcgtgaatttgattgtcgtaattaatatatagggaaattagacgtttttttgaaatgaaaataaatatatgattgattaatcgtttattttttatagagataaatatatttttagtgtcgtttttttatagggcgtattttgggaggtttttttttttttttttttttttttttttttttttttttagagtattgtattttgggatggtaattgaaatgtgttattaaaattttgatttatttttaaaaggaggtggaatatatgtaaaatgtagattggaatagtttatatttgtacgtttagtacgtaattaaattcgtttattttgtattttttttttttttttttttttttgttataattattgggaaagattatggataagttaagttaaagaaaaggttttgattagaagcgttaagtgaacgtagggatgtttatatttttcgtgaagcgcgtttttaaatagtatataggattggatattgttagtaagagtaggtataaatatagttgttattcgtttttttttgtaagtttaatgttaatttatatttttgggtattgattgtgtaggtagatttttgtaatataataattttttcggagagtttaggattttttaggaggaaattatcgtttagtattagaaagttagagttttggagggtatataggcgaatttatatataaggtataattagtttttcgaagataagaatcgatagtaagtatgtaggcgtggcggtaataagaaaaagttattttttttttttttttaggtaatgattttaattttaaagagtttttggtattttagtttgtgtttgagagagaatttcgtataagaatagtatatcgagttttataaggtaaaatagttttttattttttggtggattttttatgttttttatatttgtaagagggagtaatgtttatagtgaaatggtggttgtatagttggtgaatagtttatagagaggatgttggagttgtggttaagtgggaaatattggtttttggggttgttaatgttgaaagagtcgttgttcggttgcgtcgcgttttcgcggatttaggagtttaatttaagtcggcggagttggcggagcggaggcgttgcggcggcggtagattcggcgcggttcgggtattttttttttttattttttatttaaatttttttgttttaatttagttttatcgttattggtttgacgtagcgcgcggggacgttaggcgagcgtcgcgtttattggttgtagggcgcgcggcgtagttgttttgattattatattttagtttcgtcgtcgttgagcgttattgatcgttcggcgagttagcgggagaggattagggttttcgaggtaatttgttcggggtttaggtcgttttttttcgaagttcgggttgtcgggttgttttggttttggttttttttttttttttttttttttttttttgttttttttcgcgttttttttcggtcgcgtcgtttgcgttttcgttttttgtggcgttgttttttcgttttgcgtttttggggttttcgtagttcggttggtcgcgttgcgcgcggggtttattttttgtcgtcggtggcgagtggttggtgggtaggtttatttgttgacgaggtttttttcgggttttaggaaaaggggggaatttggagtaggtcgtttagtttggtttggtttttacgtcgtggtgtatattttcggggtttggtttgttttggttgtttcggagggttagtttttttagaattggttgcgttcggcgcgttaggggaagaagaatcgggaatgggatgattaaatttagaggaattgttttttgattgttatattattatttcgttttttttaattttagatatttaaaaacgttgggtgggaggaaaggggcgttttttgttgttgggataattaggttggaacgtatcggtaaatcgaagttgatttcgcggattgattttttgttttttagattcgcgaggtttgttttttagtttaattttagaattgaagtttattaattcgaagttaaagagcgaaatgattttttagtagtttaaagtttgtaagatttttatatattgtttaattttttttattgttggttttttgttttttgtttttaagtaaatttgtgtaattagttgtggtattttggtaattataaggataagtttttatgattttgtggagattttttaaaaatgtattagtttaagggcgcgagtagggagggatttattatagaatagtgaaagatttattttacgtttttaggcgttaatatataattttttttcgagaaattatttggagagagaagattgttaggtgtaattcgtcggtaattttttttaattatttttatatgtttttattatttgttacggttttttaaagatagttataggaaggttacgaagaattttcgcgttttttttaaagtttttaaaaagttattttttatttaatggggttgttagttttatttaaaaagttttatagatataaattatagaaggtttaatttcggtgttttgttgttgtgagaagattcggtgtgttaggaaatttttttttttatatttttcgtaaaatttaatttttgataagagttgtaaattttggtcggtcgtattggttgggtttgaacgggtaatgtttttttaaagcggaaagggaattaaagatgcgtaagtttttttttgatttagttgaggtttttttttttaggaattagttttgatttgtttttttttaaggaggattttaaattggatttgtttttttttttatttttattataagttgttttagagcgcgtgtatgaaagcgaaagttggatagatttaggttgataagtttattagttgtgtggtgtgtgtttttttttttttttttttttggtttgtttttagtttttggtattagatgtatggagttttttgttaggttgtttttgtaaagttgatgttgttaattttaatacgaagtaaatttttttagtatttgtgtgtgttttttatagagataaatatgttgattttagtaaaaaaaaaaaaaaaaaaagatattattataatgttagaaaatagagttttatttagttatattttattatgttatttttataagatggaattaaatattagaagttattagaagtttgatgatttatatttgagatttataaagtatttttattatttatttttttttaaattagtttttattttttatttatagtgtggtattttaattttttaaattaataagttattataaagaattattgtagatgatagtatttttaagtagaaaagtttgtatgcggtttgggggaaatttttagtaatagataattttattttaatggtgaagataatatttttttttttttattttgtattattgttgtaaataagtatttttttaataagtttttaaattgatagaagtaagacgtatggtgaagatattagtattaaaaggagacgtttgagggattttattatgatggatatgttttgaagtttagtgtatgtattatgatatattttgtattaaaatttaagttagaatagtaggttttgtagttttattttattttgaagttttaaattgattatggattattatgatttttttagttgattgttgtatgtggatttagtgtattaaatatatttgtaaaattttgtatatataaaattgatgagtaatttattcgtaatatttgattataggagcgattttttgtgtttaaagcggggattagattttttttttttaaaaaaggattcgttttgatttttgtatattgttaggttaaaaatatatttttgaaaacggtaatagtgtgaatttttggtttgatttttttattgagaaaatgaggagtatgagtagttattaagtgtagtttttattatttttaggttgttttaatatatttgatagtgttttttaatataaaagggatattgaaatttaagtttttttggagtttgtggtatttgtttatgtgtttttgtatatattttttaaaatgtggttgttatatttaattttttgatgggtttttagatttgtgtttttgtgtattgttgttttttttgttttagttattatttaaatattttatattaaatttaatgttagatatagatttttgtataaatattatgtttttaagttatattttaaaaatttaaataggttttaattgtaattgaaaggtaaaattatatatttagtatttatttattttttaataatttttggtagatataaatgaattttaagttgtttttttgggaaattataaatagtaagatagtttatttttttttatttaattaagattgggaagggaagaggggttttgattagttttttaatggaggtataaatttgagaatttatttttagggagatgatgttatatgtttagtttatattagaattaggtttgaaagagtagaataagttatattgttagttttattgagtaaggtatttagatgaaaaaatatgtataattgaaggatttatattttttgatgtttatattatataatttgggggttaaaatgaaataggaagattttatttatttttaaaaatggatattgagtagatgcgtatgtattttttttttcgtttttattttttttgtgtagtttttaatgatgtagaataaggttatataaatttttagtatttttaattatgtttaagggttagataaaattatgtgcgtttaaagggagttacgattaattatttatattttatcgcgaacggggtgtgggtgtttagaattaatttgcgttttttttcgttggtggtggtggtttattgaggaataattaggagaatttgtgttttaattttagagaaaaggaagagatattagtgggtatgaaatgattttttttttttttttttttatttaaaaaaatattaagtaatgataataaaggtagttgttaataataataaatttttagttgtgatttttattttgatgtttaggatttttgttgcgattgtggttttgttgagtgttaattgttttattaattagataaaatagtttgggtgaattagtaagaattttttttgtacgtagagttttttagttttattttttgagtttaggtagttgtttttgatattagtttttttggtattttttggtagacgataggttagaaggtatcgtttttgtgcggtttgttgttcggtttttagtcgagatagaattttatgttttcggtatcggggtagttgcgaaattataaattttagtttagttttgagtatgcgaaggttcgtagttgattgtagggaggcgttcggttaagcgaggacggaaatttgtattttttttttaaaattgtgtttttgaaagtatttattatgatttattaaaagcggttggtagtgttaagtgaaattttttttttgtttttttttgttttttagaatttttaagtgattaggaatagacgatttttaatcgagttttgttgcgtggagtttaggttggcgttagtgagtgtagtgtgttgatttaagtggtggtggtttaaggacgcgttgattcgtatatttggtaaagtttttattaaatgtattagattttcgcggaagtggttgtagttcggagagtgaaatagttattttttaagttttgatcggtttagttgaaatttatatttgtattgaatttggtaaaatacggacgggttcgttcgagattttaggaaatttagagtaagttatttttatgtagttgattattttttttgaaaggacggatattatttattttattgtaattttgtttaacgggtagttttgagtttagttttagcgttaaaggattgattttttttattcgttggagatttattggggacgagcgggggaggggaggcgaaggtatttcggaggaggttaagtgggggaggaggaggagtagtagaaaattattagttaagtaggggagggagttggaagttcggaaatatattaggatgttttaagtaatttttttttaagttttagaatttagttttcggaaaatagttttataaggtgttttgggaaggagttttcgggtgggttgcggaggtgatgttaagagttatagttattttatgaattaaattgacggttaaggtatgtcgggatagtttagtgtaagttgaatggtgcgtggacggggtaatttttaaagagaggtgggtaattattggtggtatttattagtatattttgtatgtaatagtagtttggaagttgaagaaaaattttttaaattttagtaaatgttcggttagttcgagagagattttagggataattttgaaggtcgttgtttgttttaatttcgtagagatgaataagagtgtgaattttggcgcgggtgtgtttagaattatttacgattttagatttatgttgttgaaatttattaattttttgtgattttacgtggagagaagaatttgttttgtttttttatttgttaaatgtcgattgagaaaaggggtttaggagacgattttttttagaaagaacgttattttattaattcggttgagttattaatttgtttttcgaaaggttaataacgttttttttttttagtcgtatcgcgcggagattaatcgttttattttaggtagttttttgtttagggtttaggaatttttgttttaaggtttttttggggtttagaagttgtgttgtgtatgttttttttaagaattttatttgtttgtttttaagtatatacggcgttagaaatttagtttagtttgagttttgggatgagagaagagttaaataaagagattttaatcgtttttttggttttttgtttcgtcgttttgtagtttgttaattttttagttagatagttttttaagttttcgtgttgcgagtgaaagagaatttttttattttatttttttattgatcgaagtagaaaaattgaatcgaatttacgttttttgttttgatttttgttagaggaaaatagaaaattatttcgtaggttttttttagtttttggatggcgagcgtagtttttgggaggttatatttagttttttattgtgaatttttcgttatttaagttcgttcgggattagggtttcggatggtttcggttgttcgtaagtacgcgaaagaagaggtgaatttaatcgttggtttagaggatagtgattagataattcgaggattattaaataaggggcggcggtgtttttgttttatggggttggcgtggggcggggggtaggtagtaagattttttaggtttttggatgtaaagagtgagaaagaaagcgtagtttttggtagtttgtttataaatgtagtttttcggaagatgaaatttgtagttttaggttgtttttttttatatttatgttttaattttttgggtttttttcgaaatgaataaaattgtggaaatgaatgaatgagaatattattttaattgttttaaatttattgttaagttattttttttgttatttgttagaggtttaatttgcgtttcgtgtttatattttagaaaattgtaaggacgttttttttgtatttgtttgttttgttggtagcgtgcggaaacgataattgtatagttattg

SEQ ID NO: 107 - DNA, 22692 bp, Artificial Sequence
  chemically treated genomic DNA (Homo sapiens)
taggtaatcggtgattaaaaatatttttaggtagtatcgagtgttaggaaaagggggtttcggggaggtgagtgaatatttacgtttttaattgaaagtttttatatttaagttattttttttgttttttttaaattaatttaaagggttggtttacgggtttttcgggggtattagtggtttaatgtgggtttcgggggtagtgagggtgggagagagttagtggttttggggttattaggtgtgtttatggtggaaagaggttgtggagttgggtaggtgagatagacgtgtttttttgttagttttaggtaggatttagtttgtagaggataaatgggtagttttggtcgtgtgtggggaggagatgtgagggcgtgaggaggttgggtaattttggttatttagtgtttggatgacgttgttatgtaagattcgagatttcgttgtatattattcgatttttttagtatgtgaggtaagttttgttatttttattttagagatgaggaaagttgaggtttagaatggttaggtgatttagttaagggcgcgtagataatgtgaggtagagttaagatttaagtttaaatgttttggttttcgtttatttggattatgaagttagtgtttttgaggattttttattattgttttttaaaataaatttttttatcggtagtcggtaggagaaaattttgttgttttgggaatggaacggtatttggggttttagttagttatttaagttttggtgtgagtggtttattttgttttttttagggttgggaatttttgaaggagaggaggagggagggtaagggtttaggatagttgtgggttttaggttaggtattattgggttttgggagtttggagtatttatgaagttaggtagggtcggttttgattttatttattttttatttgggaggtttgtggttttcgttttggaggagttcggggtaggtttttacggtgtttttgttattttggttttttttttgtattgtaggtttgtgtttgttaggttcgggttacgggtaaaatgtatgtttgtaagcgtttggagaagaagaggattaaaaagaggaaaggggagtttatggtttttaatgagaagtagattttcgagaaggttaatagttagtttgtggtgagtgagtatttgggtttagtgatcggttcgtttttttgtggattggggttttttttttttcggaagggcgtggttttttaatgcggtcggtttttatttttgggaaggggaatgttagtggtagcgttgagttatagaaaggtcgtaagatatttttttattatacggtttattgtggtcgattgtggttggttttgttttatttttagagtcggttagtgtttggttttttgttgtgtatgagatcgacgtttttgtttttttggattattttgtaaattttttagtggataaagaaagtttatttgggtttaggttgggagttgtgggttttatagattttttaggttggtgttatcgtggtggggattttagtgttagtattttggaatggtattattaagtttgtgtgtattgtgttagttagtttaggttgggttttgttgtagtaatatatttgttttaaattttaagtagttaaatatagtagaggtttatttgttatttatttgaagtttaattagattgggttatttttttttatttaatagttgttttatttggagttttgaaagtgagtgttaggggttttatatagagattttttattgtttttattggatagatgttttttagttttatttatagtttgttagttagaattagttaatatagagataagttagttttaggggaggttgggaaatgtgaagtgtatggatatttggttagttttaatattttttgttatatattgttataaaaaataaagttgggtgtagtggtatatgtttgtagttttagttatttagaaggttgaggtaggaggattgtttgaatttaggatttcgaggttgtagtgaattatgatcgtgttattgtattttagtttgggtgatatagtaagattttatttttaaaattaaatatatgtatatattaaaaataatatatatataaggtaaaaatttaaatagtatagaaggatatataataaaacgaaaagtttttttttttgagtaattattttaggtatgttttatttatgtataggttttattatttttagttaatgggatttttttgtattttttatggaggaatgttttttttttatattgtagatttttttttttatttagatttttagttatatttttttttaaagttgggtattatttttttgaagagataaagtataatttatatagttagtttttatggatggaaattgttttttatttttaaattattatagggtcgggtacggtggtttacgtttgtaattttagtattttgggaggtcgaggtagatagattatttgagattaggagtttaagattaatttggttaatatggtaaaattttatttttattaaaaatataaaaattatttgggtatggtggtgggcgtttgtaattttagttatttgggaggttgaggtatgagaattatttgaatttgggaggtagagattgtagtgagttgagattatgttattgtattttagtttgggtgatagagtgagattttgttaaaaataaaataaaataaataaataaaattattatagattagtggtatttttagaggatggaagtttgtattttgggattttattttaggttatttttagttgttagttttgtcgggggtgtaggtgtgggtagtgttatggtatgtggagatgaggtagatgaggttaattttagttattattttagttgcgggtttttttgagttcgaaatttttttttttattgttagtcgttttagtagggatttttggatgttgtttatggagttttgtttttgaagggatagtgttggcgggttttgtttagggaagaggattatgtgatttataaagttgggtggtacgtttttaagggtttttagttacgatggttgtattttttttaattgtgttttatttacggtttcggtagggagtttttacgatgttattttttggatttttttttcggtgattatttgggtagatgtgggagaaaggggatagttgtagttattgtagtagaagtatagtttttatgagtttgtttatttttggttgttattttattttttttttttaaaaatagttgatgttgatgtattagttttacggtatagttagtttttagtttggtttacgatggtcgggttttatgtgtgttatttttttatgtggagaaggattattttttggtgtaatttgttttttttgttttattatggttttgttttatagagttttgggtgtttggattttattagtagaggattagatttttttttttggtggttttttgttaagtggattagtgtattagtttatttttatattgttgattaagatataattgagattgagtaatttataaaagaaagaggtttgatggatttatggttttatgtggttggggaggttttataattatggtggaatgtgaaaggtattttttatatggcggtggtaagagaagaatgagaattaagtgaaaggggtttttttttataaaattattagattttatgagatttatttattattatgagaatagtataggagaaattgtttataatttaattattttttatcgggttttttttataatatataggaattatgggagtataatttaagatgagatttgggtggggatatagtttaattatattattttgtttttggttttttttaaattttatgattttatattttaaaattaattatgtttttttaatagttttttaaaattttaatttattttagtattaatttaaaagtttatatatagtttaaagttttatttgagataaagtaagtttttttcgtttacgagttcgtaaaattaaaagtaagttagttattttttagatataatgtgggtataggtattgggtaaatatagttgttttaaatgggtgaaattggttaaaataaaggggttataggttttatgtaagttagaaatttagtagggtagttaaattttaaagttttaaaatgatttttttgattttatgttttatatttagattatgtcgatgttaagacgtgggtttttacggttttgggtagttttatttttgtggttttgtagggtatcgttttttttttggttgtttttatgggttggtattgagtgtttgtaggttttttaggtaaatagtgtaagttgttagtggatttattattttggggtttggaggatagtggtttttttttgatagttttaataggtaatgttttagtagggattttgtgtggggtttttgattttatattttttttttgtattgttttagtagagggtttttatgagggtttcgtttttgtagtaaatttttatttgagtatttaggtgtttttatatattttttgaaatttaggcggaggtttttaaattttaatttttgatttttgtgtattcgtaggtttaatattatatggaagttgttaaggtttggggtttttattatggttcgagtattgtattggttttttttagttacggatggagtagttgggatttagggtattgggtattaagttttttggttgtatatagtacggggattttggatttagttcgtgaaattattttttttttttaggtttttgggtttgtgatgggaggggttgttgtgaagatttttgatatgttttgtagatattttttttatggttttggggattaatatttagttttttgttatttatgtaaatttaggtagttagtttgaatttttttttagaaaatgggatttttttttttattgtattgttaggttgtaaattttttaaatttttatgtttttttttttttataaaattgaatgtttttaatagtatttatgttattttttgagtgttttgttgtttagaaattttttttgtgagatattttaaattattttttttaagtttaaagttttaaaaatttttagggtaggggtaaaatgttagtagtttttttgttaaaagataataagagttatttttgttttagtttttaataagtttttcgtttttatttgagattattttagtttggattttattatttatattatttttagtattttgggtaaagttatttaataagtttttaggaagttttaaatttttttatatttttttattttttgagttttttaaatttttttaatttttatttgttatcggttttaaagttatgtttatttttttgggtattttttttagtagtgttttatttttttggtattaatttattttattagttcgtttttatattgttgataaagatatatttgagattgggtaatttataaaagaaagaggtttaatggatttatagttttacgtggttggggaggttttataattatggtagaaggtgaaaggtattttttatatggcggtagtaagagaagaatgagaattaagtgaaatgggtttttttttataaaattattaggtttgtgagatatatttattattataagagtagtatgggagaaattgtttttatgagttaattgttttttattggttttttttataatatatgggaattatgggagtataatttaagatgagatttgggtggggatatagagttaaattatattaattaggtatattttgtatgtaagagaaagtttttattaggttatgttttattttttaaagttttattgtttttttagtttatttttatttggttttgtgagaatggtttttatatttaaaagggtaagtgagttttgtttttttgattggttaagaaggtattttttagttttttttagttgatgtatatatgtgtttttgtggaggaagtatagacgttattttgttggatttattgggaggtcggggtgttagtttgttttaattcgttttggtttttttattttgatttattgaaagggaggagtaggtgtgagttttttattagttaaggaggtcgtaggtagggttatcgtagaggttatttgggtgtaggggagtagggtgaggtttttttgtttttttatattttagtttttaggattttgaggagggaagtggaagtgagtggttattgttataatttttttatggtattgtttttgtgtttttaggttaatttggtttatgtttacgagattaaggatgtattgtgtttggttttgattattatgaatgggggtgatttgaagttttatatttataatatgggtaattttggtttcgaggaggagcgggttttgttttatgcggtagagattttttgcggtttagaagatttttatcgtgagaatatcgtttatcggtgagtggaaggtattaaggatttttaagtttaagttcgagggggtggggttagtttttttatattttcgggtaggtggttgttatcgttttgggaattagttttggttagtattaggggaggatgtagagttagatagattttttattttaggaagttggggttttcggtattgaggaagcgaggtgggttattttttggttagtgttttttagtttttaaagtttagggaagttaagtaagtgaaatgatgtttttgaaattgattgtttttttaagttaaggaggacgggtcgtgattattgttttttttagttgtttttattttagtagttagggaagttgggagggggtttggtggtcgttatttgggattagttttgggaagatttgggtcgggttattgtttataagtagaatcggagtggtttatggttttattttatgttgtttttagtttgttttggtttttattttttttttttatttattttaattttatagggatttggatattgtagggttaggggtttagattttatttataatgagtagtgttttttagattttttttttagtttttttgaaagaattttgaaaaatttttgtgatgttgtattttaagtagatatttgaaatattttattatattgaaatagtggtaatttttgatatattgaaattgaatagttatattatattttttaggggatttagtggaatttttagttgttgtagttaattgatttttatttgtatttatttaaaaaatgtatagaaagttttttagtgatgaggaattttttattattttttttattttttttatttttttagaatgttaataatatatttttttgtttgaaagttttttattgattagcgtatatttttgaaataaatatatagatatatataagagtttttgaagttttttttgatcgtaagtttttaagtgttaaaataatttttttggtcggttgtggtggtttatatttgtaattttagtattttgggaggttggggtaggcggattatttgaggttagtggtttgagattagtttggttaacgtggtgaaattttgtttttattaaaaatataaaaagtagtcggatgcggtggtacgcgtttgtagttttagatatttgggaggttgaggttaaagaatcgttttaatttggaggttgtagtgagttaagattattattgtattttagtttgggtaatagagtgagatttcgttttaaaataaaataaaataattttttttgtcgagttgttattgtaattagtagtagattttatttttaattagttttttggaagtaggggttttgatatttggagtgggtcgttatagttatattcgggaggggaggaggttgttttttttttgtaatttgggagaagagttattgagaaagggtagatgggagggagattttaaaagatgttaggatagagtattttgatgtgaagaaatttaaattttttaaattgcggataggagggaattttttgttcggttttggtagatttcgatacgtagtttagtttgaagatttttgtagtggagtttattttgggattaagaaggttttgaaaataagaaagaatggttttgatgatatgtttttttttttatattatttttttatttatgtttttgttttgtttttatttaaatgaaaagagttaaaattttttttaagggttgaataaagaattttttacgtgattgttttttatttaaaaagaaaaaagaaagttttttaagttttagttcgttttttttcgggggaaagagaattatagtgttttttttttggttgtgattatttattacggtttttttttgggtttcgttttggttagtgtttattagtgagttgttatgttagtttggtggtagtcggtttgttgagatgatggttgttgtttttatttggaattgttaatatattaaaagaatgttatttaaataatagtaataaaagtattttatgataaataaggatatataaatattaattattatttgatgaggtttattggttggatttgggtatattaattatttcgtatgaggatagttgttattagttaaataaataaagttgggtggttgagaattggagtttttatttagattttgtgtattgtttgttttatggtttaattgagttgtatatattttttttttggttgtttttttatttatagagaagatttttttttataaaagtagtttttttgttggttttttttttattttgggaatgtagaggtttttttatttgtgagtaagattttgttattaagagaggagatattagggataggataaggtagttatatttatgttatgtttcgtagttgtttttttttttaggttgtagcgtagttggtgttgggggatatgttagttttttgtaggttttattttaaagggggttttttttttgtgtttttatttttttttttttgattttttttttttaattgtatagttttttttattttaggttttgttttgtttttagggttttttgagatttgtagggtttttttagttttggagtatttttagatttgtagttattgatgtgtgaataggggttatgattggtttttttttaatttttttagttattttttaggattgggaaatgtttgtggtaaacggtagtgttgttttaaattattggaaggagaaaaattagttgaagattattttgatttaaattagatagtttgagttaggaggtgggaaggaaatatattgtggttatttaggtttgattagttcgaggggtcgatttagatgttagtgtattttatttgtttagaatgtttatattttgatgtttgttgtttttttttttagagatttgaaatttgaaaatattttgttagatgattatggtaagtttttttttattcggtagttgaggtgagtattgtaattttaagaaagtaaagggttttttagggatttttagagagggttggggaagttgattacgggttttatttttattgtttagtgttgggtatttggggaagggggaaagttgtgagtgtgaatagagtttcgtttggtgaataggtagtgtttagagagattttgaaatttagagtttttgaaattttttttgattataaggttttaagtgttaaaataatttttggtcgggcgtggtttttatagtgtattgaataaggagtttagaattttagagatgttgggtaaatatttaatttttattaagttttttattttttattttgtttgtaaaatggaaataaagcgttttgttttgttttgtttatttagaaggaagagggtggtggagaggtttttatatgatagtttgagagggaattgtttgttagtttagttagttgtaaatgttttaggtattacgtttgtgtattattattattatttttttttggttgtggatattgaataataagaataattatagtattttttatagttgtttagttttatatttggaaaatagtttttatattttttttttttttttttgagatagagttttatttgtttaggttagagtgtaatggcgtgatttcggtttattgtaatttttgttttttaggtttaagtgatttttttgttttagttttttaagtagttgggattataggtgtacgttattatatttggttagtttttgtatttttttttttttttgagatgtagttttatttttgttgtttaggttggagtgtagtggtgtaattttaatttagtgtaatttttattttttaagtttaagtgattttgttgttttagttttttaagtagttgagattataggtacgtgttattacgttcggttaatttttgtatttttggtagaaatggggttttgttatgttgattaggttggttttagatttttgattttaagtgatttgttttttttggtttttttatgtgttgggattataggtatgagttatcggtttttatatttttgatttgattagatttttttatttgtatagagaagggtaaggtagtatttttgtgtttatttaatagatgataaaattgagttttaggggagttattttgttaaagttatttagtagtattagtggggagttgagggtagaaattgggtttttttttattaggttttagaatttggtagtttttagtagagggaggggagaaatcgggtcgttgatgatttgaagagaggtttgtatgggatattgttttgtggaggggcggtcggagggtttaggtttgtcgtttttttttggatgtgttcggtgttttttttggtttaagaattaagtttacgttgtttttttgttattttgattgttagtttttatcgagttagggagtttatacggttttagtttggcggggtttcgatattggtttttgttgatatttaggttggagggatgggggtggggttttggtgtttataggtagggaagggaaggggacgtgtttttttttgtggggtaagttgtggtcgcgattttgtttaggtgggttgtgggagggataaagattaaagtggagttttagtttagcgtttttcgttttgggggtttagttttgggttgtgagttgggatttatttttaggttttgttaggttagattagatgtttttttttttcgtttttttaaagtgaaaaataattaatttttagagattaataaggtaggtcggggagttgttttttaaatcgttttataattttttttttttaagtaaattgttgtataatgttagaagaattttatattttttttatgaagtaattttagaattaagttaagattttttgattttagcgttttaggaagtttatttagtttttgattaggtaggtcggttaacgtttagtcgggtttaggtattttattgtatttttatgttttatttttgaagagtgggtatttttttgtgtttttttatatttgtatttttttaaggtttttgtggttattttgagatggtagattggggtttttgttgtttttggatagatgagaatgtcgagagttcgtatgttttgtttaagggtatatagtaaggtcgggtgtttatgcggttgttttagggatttattgattttgttgttttttttaggttatattaggattttagatttgggtttggttgtgaagattttcgagggagatttgattcgcggtcgggtgggtattgttggttatatgggtgagtgttgggttgtttgtgttaatgtattttgagatttattatttgtttatcgtcggtcgagtttttagagtttgttcgtagagtttttcgtttttttatgtattgttgattatatatagagttatagtttttgtagggttgttggggggcggttttagttagggggagggggagtataggggttttagatgtgatgattgttttgagttttttgtatttttaggtttttagttttatttgtgtttaaagttaagttatttttaggggtcggggtttggtatatagcgttgttaggggaggttatattgaagtaggggtttgggaggagaggtttttgagaggaaggaggtaatttataagagttcgtaaatgagaggcgcgtatagttgttgtgttattaagtatgattttagtagagagtagttttgggtttttgttatttttttttagtttgttttgagattagcgttttgggggttgtagggaagagatttagagttaagttttgtgttttagaatttttcgtttaattgggggtacgttttgggtttttttttgtgtattttatatatttatttttttttttttgagaggcgcgtgttcggggagtaggtacgttgtcgttttttagttaggttggtattgatagtagttgtataggaggtgtgttttgtttttggtgttagagggttttttttagattgtatgatatttggtaatttgtggagtgtgtgtttgtgtgtatgtgagtgtgtgtgtgtttatatgaatgttgatcgatgattgataggtaggcgggtgggcgggtggatggatggttggatggatgatggatgatggatgggtggatgatagatttgtttatttgtgtgtgtatttgtttgggtttttttttgtagagtgttttatgtatttgtttgtttcggtttttgtgtgtaaattagtatatgtgtggatgtatttttttttagatatacgtgttgatgttgtagaattattttttttgtatttttatggtaaatttgtaattcggtttattaaagtggtatagaagatatagtaagagattgtttgaattatagataaatttaagattatttttaatttgggtagatatatttttatttattgaaataaatatattgatagtatttgttttgtgttaggtgttatattgttacggtagtgaataaagtagtttatgttttaggcgaggggatattaagagtgtaggatatttttatttacggtggttagagttttaaagttatagttaaagtttttcgggggtatagaggagagttattagggtaagttttttggagggggtggtatttatagtagttggtggggtaagagttggtggcggttatgaaattttaggttttttgtgagtagcgttattagttgttttttttttttttatttttttttttttttttttgtttttagttttagaggttttgaataattagaggtacggtttgagtttcgattattggggttttggttgttttatttatgagatgatcgagggttagtcgtcgtttcgcggtcgtaaggagaaggtgaagcgggaggaggtggatcgtcgggttttggagacggaggaggtgtatttttataagtttttcgaggaggttaagtttatttgtaagatggtgagtttttggtggttagatgttatttttaagttggtggtttttttttttgggtttggttttagtttgtttttagaatagtaaataggttgaagggataggggtttgagtatgggggtgggggttgtagtttattaagttagagttgagggtattttttgttgtggattggggtggttagcggagatttttaggagaaagtttgggtggggtagggatatttaggaattaagggaagaggggtgaggggaatagtgtggaatatttttatatttagtttgtgggggggtttatatagggcggagaagagatggtttgagttggtgttttagatataaagtaattttgggttaagtttcggtttttgttcgtgggttttttgttttttttatttttggattttaaggtgttggtttaagacgaagggttatagggggtgggggcgacgattttagtttttgaatattttataataaagttttttattattagatggattgttggttacgttagtttggtttttgtatgatagggtttagggatagtgaggttagatttatttaaaagttgggtgggtggggttagatggggggattggaagttagataaggagtgataggagttattggaagtgggggatatgggagtggagttcgttcgtgtatttttgttattgggtcgttttatgtcggtttttaggtttttttttgggaattaggattagtggttggttttgtggggagatggttattttttgttgttgtttggtttttagtttttaagtttagtttatgtttttttggggtttttttttttatggtttttagtatagttgtgttggtatttttattgtaagtagttgttttttaatgttagttttatagggataggaggggtcggagtatttagttttataattgttagtttatagatttttttttttttttttggagttatagatgtatttcgtattttatgtattcggagttatagatgggtaaatcgagtttgggaggggggagttatattttttatttttttatatttgtaggtatttttggggtagatttagcgtgtgtattgataatttaggtaattttcggagtttaggaagtagtagttttgggagttgattaaaagtcgtaatgtttttgtttaggaagatttgagatttgcgtcgtaagcggttttaggagggtttggttcggttttttattttagaggttttttttttgtagttagatatttttgtttggtttttttttgttattaattttatttttatattatagagttgtgggaagaagttttgtgtgtatagtagatttatattttaattttatagttgttggttcgttatgtagttggggttttagagaaagttatatggttatcgtagttagggttagggtggggggatcggaggagtagtgtagtattggtcgggtaaatggaaatgtgggtgtgagttatatttggttgttttattgggagatatttgttaggtgcgataaaacgagataagggaaagaagaaggggttagatagtcgtgggtagagtattattaaatgttttaggttagggttaggtaattagagaagtaggttttgagagattttagtagggatatgggacgtattaagaggatgacgaggcggagagggttttagttttatttttagattttagatatttattttggtttttggttttggagttgggattttttgttgtagtttggattagggtgttgttgtttttttgttgttttttggtggatattgagagaaagtttgttgttttcggaggatttgtttcgtgggtataaaattattgttttttggaagtttttggttttgttgcggttttttttataaatgatttttggttttgggagtttagttttaggttttttttacgtttttgattgtagtattttcggtatttaggtttattttgttttttttagttggtggtagtttaggatattgtagagtttgatttgttaggagatttcgtaggttttgggtttatagggttatttttaggttttggtggttttagttttgtttgtttaagagggtttttttataattagtgaggaagttagtttttggtttttaggtttgttttttattttattttagtagtcgtagaatttatttttttttttttggagtttagaaatttatatattttattattttgttttttgagtttagtttatgggtttagattttagtttttattttttttaaatttttgtttagttttagtattgggttttagtttttttttagtttttttttgttttttagtcgttttggttttatttgtttttttagtttatttgtattttttttttaggaagttcgttttgtttgttttatttattttagtttatatttttttttttttttattttttttggtgtttatttgatagtatgattgtaaattttttatttgacgatgtggttgtaaattgttgattggatgttagggttttaaatggtagtatataggcgggtgtttaatttgtatacggttttttaaaagaagtaaatggtaggtttattgttaagatttagaaatgaggagattttatgtaataatttggattttttggttttttttgaaaagtagaagttttaggttttggttgtcgttttatttggtaggagttgatatatagttcggttcggtttatttagtttatttttcgttttttttattttcgtttgtgttatttttttggttagttgttgtagtttttgtagaaggagatttgtttttgagggattgtttagaatagtgtagtatttgggtttagtttaatttagtgttttgagtttttgttgaatagtgaagtttttagagagagaagtagaggtatgagtgttagattttgagtcgttagtttggtggttcgtgggggcgttaaggggtaatattgagcgattgagtgttttgttttgtttttttaagggtggaatttggtgttggttttgatgttattttcgatttttttgtttggggggtagttttttttagattttgagttttaagaggttagtttggttgtttatttttttcggcgtttttagtcggtgtagtgtttgttttataaggattagtaggaagtgtatatgggatgaatatgagtaaagcgtatagggtattgggaaaagataaggttgggtttttattttaagtagtttgtttttttggattttagttttaaagtagatatttagtagatattaattgcgtatagttgtagcgtttagtaaggtagaggagaagagagaattacgaggttggggtattgggagtgtaggttaggggtcggggttttgtggtcgtgtggttggttatggttagttaaggttttttgcgtaggtttagttttttggttttatttatagttttatttcgttttatttgggtgtttgtttttaaagatttttttttttttagtaatttttttgtttcgtggttttgatgaagatatttttttattttaattatttttggttttttttatttttagatgaaaatttcgttatttgatttggtttttaggattttttattatttttttttgattagttttttttttttgatttatttttgtatttttttttcgttttttaagttaaacgtgttttgggtgttttttagatttattttgtacgttttgttattttgttttgttggtgtagttttttttatttgtatatttttttttttatttatattttgaaagtttatttgttttgtaagatttaatttaaatatttttttttcgtgtagttttttgatttttagttggtagttagttatgttttttgttttcggggtgttcgatttgtattattttgatgcgttttttgagtatgattagttttttatgagtttgagtatttttagaggttaagtgtttcggtggtgttttttttgttaggaaggggtttgtatttaggaggtataattttgtaaattagttgagtatgtgtacgagatagagttattgatgtagtttttgttttttgttgtttattttatatagaagaggtgatagtgattcgatatttattaatgagtgtttattataatttaggaacgaggtttgtaattttgagagaaataagatttttgtttttttgttttattaggtatttagttaggttgtgagtgtgtgagtatagatgtacgttaagatttagaggtagttttgaagtaagatttttgtagggtggggtagcgtgttttgggtttttaggtatggtgtagatattgtggaggtaggaggttcggataggaggagaggtttaggggacgtggttttatggggttttttgttttagttgtttacgaaagatgcgaagtagaggttgggttgttaggaggagggggttgtagaggttaagagatattttttttttaggaatatgaattttaagcgtttagaagtcgggatgttggatttttttttcgttttagacgtgagtagttttttttagtttttagtagttttttttatagggtatttagggttgttttcgagtgttgttttatagtgagttggtgtagagtgtggggtatatcgtgtttttgtggggattagggttttttttcggttattttttatttaagttgtagatgaattttacgttaggtagtgtagaagaggcgtgggttagggagtttatattggttgtttagagatttgggtatttttttaggtttgggggttttggatagattttttttaagcgttagttttttttttgtttagtgaaattagtaatatttatgttttttatttgtttgggagatttgagggtgaaatgagaattgaatggggaatgtttttaagagtattgacggttattatatttagtttattttgattagtatgtatgtatcgagtattattgttgacgttaggttttgggttaggtagaaatataagaggttttttttttagtagtttatattgtagggagttgtatttttttaggaggtttttaggttttttagtcggtgtgtgaggtaagattttagttgaggtagaattgtttttgaaagttttttatatggtttataaattatgagtttttagttggattagaggtttaagagatgtagattaggtagaggttgggtgatttgtgcgggatacgtgttgtgatttcggggtttgttttgtttaaagttagggagttagaagttaggaaggtttgttgtgtttcggtttttgttacgttttcgcggatgattttttgttggtagggggattgggtcggggattatggaggtcgtgggagtagtagtgtgttgtaggcgaatgattgtatttttagagagtttatgtgtatttttttttttaatttcgtgtttaatggttttgcgtcggtagtttatagtagatttggtggtagtatttgtatagtagtaatttgtaaatgttataaattagggtttttgcgttttttttttttagaattagtggttattatttattagtatcgttttgagtggaggtaggtggggatcgtttttggaattttggtattttttatatatggggattttttggttttttgggatagaaggtggtttgggaagttgttaggtgcggattagtgtttatggtaattatattatagatttcgtttggttagggatggtattagtgtgatgggtaattagggaatgttttttggagaaatacgggggttattgagaatataaagagtaggtcgggtacggtggtttatgtttataattttagtatttgggaaggttgaggtagtcgggttaggagttcgagattagtttgattaacgtggtgaaattttatttttattaaaatataaaattaattaggtttgggggtatatatttataattttagttatttgggaggttgaggtaggagaattatttgaatttaggaggtagaggttgtagtgagttgagattgtattattgtattttagtttgggcgacggagcgagattgtattttaaaaaataaaaagtgaaagttattgaatgttgtaaatttaatttgtagatgagtttgagtaggtagggggaggatggtaattatagtattgttttcgattttggttgtttggcgaatcgtttggggagtatgaataatattcgttttggatgtagtttttagggagtttggggtaagattcgggttttaggagttttgaaatttttttagttgattttagcgtagagttagggttgagagttattattatgggaagtgttatatgtaaggagtgtgttgtttgttgtttgtttttagtgttaagggttttgggagtggttattttttggtgttttaggaaattatatagtgttgagtgtatgaatattacggttgtgttattgggttgatgttcgaaattggagaggatgtgggtatttagattgggggtgtggtaaaggtttggaattcgggtggttatttttgtggtttttgggttatttattgttatggtgacgggttgagattagttatcgtattggagttatttttttattttttagtatattttaggtttcgtgttaggttttaagggagattttatggtatataaaatagttggttgtttttagtttgaagaggagtaggggtgttagtaaaattttttaaatagaagtagaaatacgagttataagagaagagaataggtagttttcgggaagatgggagagtagcggggttttcgtgcgtgtatttaggtatggttggagaaaagcgttttaggttttggaagtagtatgtggaaggaggcggttttgagggttagagcgattaattgttttgttttgtttgggattgttttgtttttagtattgaaagttttgtgttttggggagatagggatagttggttattttgggagtgattttggttatttcgaattagggtattaggaggatgaggtagtagagtttcgtaaagcgtatagtttgataaggtgtatagagtagtttatcggtgtttttttgttttagtcgtgtattttgtggtttagggtttttgtttttggtattcgaggttttaggttagtaaaggttgtaggttttggagtgcgaagtcgttgtgagttggggattttgttttttttttattggttttttttaggttgtacgttaatttttagttatttttgttagttttttatagttatttcgttttttatagttttttttgttagttttttatagttttttttgttagtttttttagtcgtttttgttagttttttatagttatttttgttagttttttattatcgtttttgttagttttttatcgtcgtttttgttagttttttatagttatttatgttagttttttatagttattttatttttatattattgtcggggttgttgttatatttttaaattacgagtattgtgagtgatattattttttttatttttattgattttttttttaaaataaaaattaatgtattttaaaaggaaatttttttaaggaaataatagttatgaaagaggggtttgggtgtgttaggtaattttttgttttattatagatttttaaaatacgtttattttttaatatttttttgtaagttatttagggttagtttcgtgagtttgatttggtattttttagggtattttgggtttttatatttggtttagtgttttttgttgttattttaaaattttaaatgtggaatatggattttgcgtttttattttgcgttgagtatgtgaatgatgtggttttgtttttagttaaaagttcgttgagttttacggtggcgtgtatttcgggttttgggaattagagaagggtcgtagttttgtaattggatatttttgttcgtatttttgttttcgtttacgtgtatttgggtttatggtttgttttgttggggatagtatggttttgagttttgagttggagattagagtagattggaggggagagttttagaaagtgtcgagttttgagattattgttagaatttttttggtatggcggagtttatgttgagtcggtgtattgatttataattttcgtattagttaaatgttaggagattataagtaggaggtagtttttattttttagtgatagatgtgttattaggtttggggatttttttatattttatttggggttgtttttataaaggttttatttttagaggttttgggaagtttttttatattaattttgaatttttagagggtagggtttatttaggtttatttttgttttggtatagagtaggtttttagtgtatagttgagggacgagtaaggtaaaagatatgtttattataataatattagtttttagttacgggcgttaggttcggtggttagtattgatagtagttttatcgtttaggtgtttcgttgtttttattttgtcggtaaggaaataggatataggttttaggggatatgagatttttttaaagtttttaagttttatagttgggattttagtttacgtttgtttagtatgggtaagggagtgatggtaggaatgagttttgggttgggtatttaggtgtttcgagtttttgtgttattttagttagggttttcgttatggatttgagagagggttgtattgttatttggaggggtcgtataaaaaaattataggttattatttgaggtggataggaagtttagttaagttattggggtcgattttttttttggatttatttgtatttgagttatatattttttagttattatttatagtagttttgggggtgtgttttgggaagatttttttttgttttttaaaattttaaggtttggttcggggttattggagtcgtaggcgggatatatgtgtgatcggttttttgtttttggtagtttcgcgttgtgtattgtaaggacgtgttggatatcgagtagttttttattgtgaagggcgttaatttggattatatagacgacgatttttattttaagttttttacgggttttgtgtttattttatggtaaaacgaggtgagtagggtagattatttgttttggtttgggtgggagggagggattgacgggtggaaggaggcgtcgggaatatgagtttggcggtaggaggttgagcgtatggtttttgttttttttatgaaggtagtatataaaagttgttagtggttaagtagggagttgtagttattacgggttagttattgacggggagtttcgtttagtttttgagatttggagggcgtgtggtttaggggtaggtgaggttagggg

SEQ ID NO: 108 - DNA, 22692 bp, Artificial Sequence
  chemically treated genomic DNA (Homo sapiens)
tttttggttttatttgtttttgagttatacgttttttaggttttaggggttgggcgaggtttttcgttaatgattggttcgtggtggttatagttttttatttggttattgatagtttttgtgtgttgtttttatggagaaaatagaaattatgcgtttagttttttgtcgttaaatttatattttcgacgtttttttttattcgttagttttttttttttatttagattaaagtaagtggtttgttttgtttatttcgttttgttatgggatggatatagagttcgtggagaatttggagtagaagtcgtcgtttgtgtggtttagattgacgttttttatagtggagaattgttcgatgtttagtacgtttttatagtatatagcgcggggttgttaggggtagagggtcggttatatatatgtttcgtttgcggttttagtggtttcgagttaggttttggggttttggggagtagaagggagtttttttaggatatatttttagaattgttatgggtagtggttggagggtgtgtggtttagatgtaggtgagtttaggggaggggtcggttttagtggtttggttgggttttttgtttattttagatgatggtttgtggtttttttgtgcgatttttttagatgatagtgtagtttttttttagatttatgacggggattttggttggggtgatataggagttcggggtatttgggtgtttagtttagggtttatttttgttattatttttttatttatattggatagacgtgggttagagttttagttgtggggtttaggaattttggggaagttttatattttttgaggtttatgttttgtttttttatcggtaaaatggggataacgaggtatttgggcgatggggttgttgttagtgttggttatcgagtttggcgttcgtaattgggagttggtattattatggtaggtatattttttgttttattcgttttttagttgtgtattgggggtttgttttatgttagggtagagatgaatttgggtggattttgttttttaagagtttaaggttggtgtggggaggttttttagagtttttggagatgaggtttttatagagatagttttaggtggggtgtgaagggatttttagatttggtgatatatttgttattggagggtagaggttattttttgtttatagttttttgatatttggttaatacgaaggttgtgaattagtgtatcggtttagtatgggtttcgttatgttaggaaggttttagtaatggttttagggttcggtattttttgggatttttttttttagtttgttttggtttttagtttaaggtttaaggttatgttgtttttagtaaagtaaattatgggtttaagtgtacgtggacggaagtaggggtgcgggtaggggtgtttagttgtagagttgcgatttttttttagtttttaaagttcggggtgtacgttatcgtggaatttagcggatttttagttggaagtaagattatattatttatatgtttagcgtagaatgaaaacgtagggtttatgttttatatttagaattttaagatggtaatagagggtattgagttaggtgtggggatttagggtgttttagggggtgttaggttaagtttacgaagttggttttgggtggtttgtagaggaatgttaagaaatgagcgtattttaaaaatttgtaatggaatagaaagttatttggtatatttaaattttttttttatggttattatttttttggaaaggtttttttttaaaatatattgatttttattttaaaaaaagagttaatggaagtgaaaaagatgatgttatttatagtgttcgtggtttaggaatgtggtagtagtttcgatagtggtgtggggatgggatgattgtggggggttggtatggatgattgtggggggttggtagggacgacggtggggggttggtagggacgatggtggggggttggtagggatgattgtggggggttggtagggacgattgggggggttggtagggaagattgtggggggttggtagggaagattgtggggggcgggatgattgtggggggttggtagggatgattgggggttggcgtgtagtttggggagggttagtggggaaaaggtaaagtttttagtttatagcggtttcgtattttagggtttgtaatttttgttgatttgaggtttcggatgttaggaatagaggttttgggttatagggtatacggttgaggtaggagggtatcggtgggttgttttgtgtattttgttaggttgtgcgttttgcggggttttgttattttatttttttaatgttttgattcgaagtggttagggttatttttagggtgattaattgtttttgtttttttaggatataggatttttagtgttaaaagtaggatagttttaggtaaagtaggatagttggtcgttttgatttttagagtcgtttttttttatatgttgtttttagggtttggagcgtttttttttagttatgtttgggtgtacgtacggaggtttcgttatttttttattttttcggaggttgtttgttttttttttttgtgattcgtatttttatttttatttaaggggttttgttgatatttttgtttttttttagattggaaataattaattgttttgtgtgttatgggattttttttggggtttggtacgggatttggagtgtgttggaaggtagaggaatagttttaatgcgatgattaattttagttcgttattatagtaataggtagtttagaggttataaggatggttattcgggttttaaatttttgttatatttttagtttggatgtttatattttttttaatttcggatattagtttaatggtataatcgtgatgtttatgtatttaatattatgtggttttttggaatattaaggagtggttatttttaaagtttttggtattaaaaataaataataaataatatattttttgtatgtggtattttttataatagtgatttttaattttggttttacgttagaattagttggggaggttttaaaatttttgaagttcgagttttattttagattttttggggattgtatttaaggcgagtgttgtttatgttttttaggcggttcgttaggtagttagggtcgagagtaatgttgtgattattattttttttttgtttgtttaagtttatttgtagattgagtttgtagtatttagtgatttttattttttattttttgagatgtagtttcgtttcgtcgtttaggttggagtgtagtggtataattttagtttattgtaatttttgttttttgggtttaagtgatttttttgttttagttttttaggtagttgggattataggtgtgtgtttttaagtttggttaattttgtattttagtagagatggggttttattacgttggttaggttggtttcgaatttttaattcgattgttttagtttttttaagtgttgggattataggtatgagttatcgtgttcggtttattttttatatttttagtggttttcgtgtttttttaaaaagtattttttgattatttattatattgatgttatttttggttagacggggtttgtggtgtggttgttatggatattgattcgtatttagtagttttttaagttattttttgttttagaggattagggaatttttatgtatagggggtgttagagttttaaggacggtttttatttgtttttatttagggcggtattggtaagtgataattattggttttgggagagggggacgtagaggttttgatttgtagtatttgtaaattgttgttgtgtagatgttattattagatttattgtaagttatcgacgtaaagttattggatacggaattgggaagagaggtgtatatgagttttttggagatgtagttattcgtttgtagtatattgttgtttttacggtttttatagttttcggtttagtttttttgttagtaaggggttattcgcgggagcgtggtaggagtcgaagtatagtaggtttttttggtttttgattttttgattttaaatagagtaggtttcggaattatagtacgtatttcgtatagattatttagtttttgtttggtttgtattttttgggtttttgatttagttgagagtttatgatttatagattatgtaggggatttttaaggataattttattttagttggaattttgttttatatatcgattgggggatttggggattttttgggaagatgtaattttttgtaatgtgagttgttgggggaggggttttttatgtttttgtttggtttagaatttggcgttaatagtagtgttcgatgtatgtatgttggttaagatgaattgaatgtagtggtcgttaatgtttttgaaagtattttttatttagtttttattttatttttaaattttttaggtaggtgggaggtatgagtgttattggttttattggatagggaggaaattgacgtttagaaggaatttgtttaggatttttagatttgggaaagtgtttaagtttttggatagttaatgtgggttttttggtttacgttttttttgtattgtttggcgtgaagtttatttgtagtttaggtgaggagtggtcgggaggggattttggtttttataaagatacgatgtgttttatattttgtattagtttattgtgaggtagtattcgggggtagttttgggtattttgtgaagggagttgttgggggttgggggaggttatttacgtttggaacgaagggagggtttaatatttcggtttttaagcgtttgaagtttatgtttttgaagaaggggtgttttttgatttttgtagttttttttttttggtagtttagtttttgtttcgtatttttcgtgagtagttgaaatagagagttttatgaagttacgttttttgggtttttttttttgttcggattttttgtttttatagtgtttgtattatgtttaggaatttaagatacgttgttttattttgtaaaggttttgttttagggttgtttttgagttttggcgtgtatttgtgtttatatatttatagtttggttagatgtttgatgggataggagagtaggaattttgttttttttaggattatagatttcgtttttgggttatggtgggtatttattaatgggtgtcgagttattgttattttttttgtgtagggtaagtaataaaaggtaaggattgtattaatagttttgtttcgtgtatatatttagttaatttgtagagttgtattttttgggtgtaagtttttttttgatagagaaggtattatcgaggtatttggtttttaggagtgtttagatttatggggggttaattatgtttagaggacgtattaaggtgatatagatcgggtatttcgggggtagggggtatgattggttgttagttggaggttagggagttgtacggggaagaggtatttaagttgagttttgtaggataaataggtttttaaggtgtgggtagggggaggggtatataggtagagggaattgtattagtaaagtagagtggtaggacgtgtagggtgagtttggggaatatttaaaatacgtttgatttagaaagcgggaggagggtgtagagatgggttaaggggagggggttggttagggagagatgatagaggattttgaaggttaggttaggtggcgggatttttatttggaggtagaaggagttagggatggttgaggtaggagagtgtttttattagaattacgaggtaggaaggttattaggagaggaagagtttttgggagtagatatttaggtgagacgggatgaggttatgaatgaggttagagggttagatttgcgtagggggttttgattagttatggttagttatacgattatagggtttcggtttttgatttgtatttttagtgttttagtttcgtgattttttttttttttttgttttattgagcgttgtagttgtacgtagttggtgtttattaagtgtttgttttgaggttaaaatttagaggagtagattgtttggggtaggggtttagttttgtttttttttaatgttttgtgcgttttgtttatatttattttatgtatattttttgttggtttttgtggggtaggtattgtatcggttggggacgtcggggagagtgagtagttagattggttttttggggtttagggtttggagggggttgttttttaaataaaggaatcgaaggtggtattagggttagtattaggttttatttttgaaaggataaagtagagtatttagtcgtttagtgttgttttttaacgtttttacggattattaggttggcggtttagggtttggtatttatgtttttgtttttttttttgggggttttattgtttaataaaggtttaaggtattgggttgggttgggtttaggtgttgtattgttttaagtagttttttagaggtaagtttttttttgtaggggttgtagtagttggttaggaaggtggtataaacgaggatgagaaaggcgaggggtgggttgggtgggtcgggtcgggttatgtgttagtttttgttaggtgggacggtagttagggtttggggtttttgttttttaagagaagttagaaaatttaggttattatatgaaatttttttatttttaaattttggtaatgaatttattatttattttttttgaaaaatcgtgtgtaggttgaatattcgtttatatgttgttatttgaaattttggtatttagttaatagtttgtagttatatcgttaggtaaagagtttgtaattatgttattaggtggatattaggagaagtgagaggaagagaaggtgtgagttgggatgggtggggtaggtagagcgggttttttggaggaggggtatagatgggttggaaggataagtgagattaagacggttgaaaggtaagagggagttggaggggggttaaggtttagtgttgggattgagtaggggtttggggaagatggaggttgaggtttgggtttatggattgggtttaggagataaagtggtgagatgtgtgaatttttgggttttagaggagggggagtgggttttgcggttgttaaggtagaatgggggatagatttgggggttagagattggtttttttattgattgtggagggatttttttaggtaggtagggttggagttattagagtttagaaatagttttgtgaatttaggatttgcgaggttttttggtaagttaggttttgtagtgttttgagttgttattagttggaggggataaggtaggtttagatgtcggagatgttgtagttaagggcgtgaaggaggtttaagattagatttttaagattaaagattatttgtaagggaagtcgtagtaaggttagaggtttttagaggatagtggttttgtatttacgggataggtttttcgggagtagtaggtttttttttagtgtttattagggggtagtagagggatagtagtattttggtttaggttgtagtaggagattttagttttaaagttaggggttaaggtgggtgtttggggtttgggggtgggattggggtttttttcgtttcgttatttttttagtacgttttatatttttgttgagattttttaagatttgtttttttgattgtttggttttgatttgggatatttggtgatgttttgtttacggttgtttgattttttttttttttttttgtttcgttttgtcgtatttgatagatattttttaatgagatagttaagtatggtttatatttatatttttatttattcgattagtgttgtattgttttttcggtttttttattttagttttggttgcgatgattatgtggttttttttgaggttttagttgtatggcgggttaatagttgtggggttagagtgtgggtttgttgtatatataggatttttttttatagttttgtgatgtgaggatgaggttggtgataggaaggggttaagtagaggtgtttggttgtaggagaggggtttttggggtgaggagtcgagttagatttttttggggtcgtttgcggcgtagattttaggtttttttgagtagaagtattgcgatttttaattaatttttaggattgttgttttttaaatttcgggagttgtttgggttgttaatgtatacgttgaatttgttttaaaagtgtttgtagatgtagaggggtgggaagtgtggttttttttttttaggttcggtttgtttatttgtggtttcgggtatatgggatacggggtatatttgtggttttagggagaggagaggaagtttgtgggttggtaattgtggagttgggtgtttcggttttttttgtttttatgaggttggtattagagggtagttgtttgtagtgggggtgttagtatagttgtgttggggattataaggaggagggttttaagggggtatgggttggatttgggggttgagagttaggtagtagtaggaagtggttatttttttataaagttagttattagttttggtttttagggaagggtttgagggtcggtatggggcggtttagtggtaggggtgtacgggcggattttatttttatattttttatttttaatggtttttgttattttttatttggtttttagtttttttatttggttttatttatttagtttttgggtgggtttgattttattatttttagattttgttatgtaggagttaggttggcgtgattagtagtttatttagtggtggaaaattttgttataagatgtttaaagattgaaatcgtcgtttttattttttgtagtttttcgttttaaattaatattttaggatttagaggtggagggagtaggaggtttacgggtaggggtcggggtttggtttaaggttgttttgtgtttggggtattagtttagattatttttttttcgttttgtgtggatttttttataggttggatgtgagggtgttttatattgttttttttatttttttttttttggtttttgggtgtttttgttttatttaggtttttttttggaagttttcgttgattattttagtttatagtaaggagtgtttttaattttagtttggtgggttgtaatttttatttttatgtttagatttttgtttttttagtttgtttgttgttttggggatagattggggttaggtttagggaggggagttattagtttgagggtggtatttggttattaggagtttattattttgtagatggatttggttttttcggagaatttgtgggagtatatttttttcgtttttaggattcggcggtttattttttttcgttttattttttttttgcggtcgcggaacggcgattggttttcgattattttatagatgaggtagttaaggttttagtagtcggggtttaggtcgtatttttggttgtttaggatttttggagttgggggtagaggagaggagagaggagtgaggaggagggagatagttggtggcgttgtttatagaaggtttggagttttatggtcgttattaatttttattttattaattgttgtgaatattattttttttagggagtttgttttgatgatttttttttgtgttttcgaaggattttgattgtagttttagaattttgattatcgtggatggaggtgttttgtatttttgatgttttttcgtttagaatatgagttattttatttattatcgtaataatatgatatttggtatagaataggtgttattagtatatttgttttaatgaataaaggtgtatttatttaaattaaagatgattttaaatttatttgtaatttaaataattttttgttatgttttttgtattattttgataaatcgaattatagatttattatagaaatatagaaaagatagttttgtagtattagtacgtatgtttggagggaaatgtatttatatatgtgttggtttgtatataagagtcggggtagatagatgtatggaatattttgtaaaaggagatttaggtaaatgtatatataggtaggtagatttattatttatttatttattatttattatttatttaattatttatttattcgtttattcgtttatttattaattatcgattagtatttatgtgggtatatatatatttatatatatatagatatatattttataggttgttaaatgttatgtaatttgaaaaggattttttagtattagagataaggtatattttttgtgtagttgttgttagtattagtttgattagagggcggtagcgtgtttgtttttcgggtacgcgttttttaggggaaggagggtaggtgtgtgaaatgtataggaggaagtttagggcgtgtttttaattggacgggggattttagggtataggatttaattttgggttttttttttgtaatttttaggacgttggttttagagtagattgaggaaaggtggtaggagtttaaggttgttttttattggaattatgtttggtgatatagtagttgtgcgcgttttttatttgcgggtttttgtgaattatttttttttttttaaaggtttttttttttagatttttgttttaatgtggttttttttagtagcgttgtatgttaggtttcgatttttaagagtggtttggttttggatataggtggggttgggggtttgggagtgtagagagtttagagtagttattatatttggggtttttgtgttttttttttttttggttaaggtcgttttttagtagttttgtagagattgtgattttgtgtgtgattagtagtgtatgaagaggcgagaggttttgcgggtaggttttgggggttcggtcggcggtgagtaggtggtgggttttaaggtgtattgatataggtagtttagtatttatttatgtagttaatagtgtttattcggtcgcggattaggtttttttcggggatttttatagttaagtttaggtttgagattttaatgtggtttgagggggatagtagggttagtgggtttttgggatagtcgtatgggtattcggttttgttgtgtgtttttgggtaaggtatacgagttttcggtatttttatttgtttaaggataatagggattttaatttgttattttagagtgattataagagttttgggagagtgtaggtgtgggaggatataggaaaatgtttattttttaggagtggaatataaagatgtaataggatgtttggattcggttggacgttgatcgatttgtttagttaaaggttgaatgggttttttggaacgttgaggttagagaattttggtttggttttgggattattttatgggaaaaatgtgaggtttttttggtattatgtaataatttgtttaaggggaaaaaattataaaacgatttgggaagtagtttttcggtttgttttgttggtttttggagattggttgttttttattttagagaaacgagaagggaaaatatttggtttgatttggtagagtttggagatgaattttagtttatagtttaggattgagtttttagagcgggagacgttgagttgaggttttattttggtttttgttttttttatagtttatttgggtagggtcgcggttataatttattttataggaaggaatacgttttttttttttttttgtttatggatattagggttttatttttatttttttagtttagatgttagtaagggttagtgtcgagatttcgttaggttggagtcgtgtggattttttggttcggtgggggttgatagttaggatagtagaggagtagcgtgggtttggtttttagattaagggaggtatcgggtatatttagagaggggcggtaggtttgggtttttcgatcgtttttttatagggtagtattttatgtagatttttttttaggttattagcgattcggttttttttttttttttattgggggttgttaggttttggggtttggtgggaggagatttagtttttgtttttagttttttattgatgttgttgggtgattttggtaggatggtttttttgaggtttagttttgttatttgttaaatgggtatagagatgttgttttgtttttttttgtgtaggtgggaagatttagttagattaaaggtgtggaaatcggtggtttatgtttgtaattttagtatatagggaggttaaggagggtagattatttgaggttaggagtttgagattagtttggttaatatggtaaaattttatttttattaaagatataaaaattagtcgggcgtggtggtacgtgtttgtaattttagttatttgggaggttgaggtagtagaattatttgaatttgggaggtagaggttgtattgagttgagattgtattattgtattttagtttgggtaataagagtaaaattatattttaaaaaaaaaaaaaaatataaaaattagttaggtgtggtggcgtgtatttgtaattttagttatttgggaggttgaggtaggagaattatttgaatttgggaggtagaggttgtagtaggtcgagattacgttattgtattttagtttgagtaagtgagattttgttttaaaaaaaaaaaaagaaggtataggaattattttttaggtgtgaggttaaatagttgtgaggggtattgtggttgtttttattatttagtgtttatagttaagagaaaataatgatggtaatgtataaacgtaatgtttgagatatttatagttggttagattgataagtaatttttttttaagttgttatgtagaagtttttttattatttttttttttttgggtgggtagggtagggtaggacgttttgtttttattttataaataagatgagaggtggagaatttgatggaagttaagtatttgtttagtatttttgaaattttggattttttgtttagtgtattgtagagattacgttcggttagaagttattttaatatttagagttttatggttaaagggaattttaaaaattttgaattttaaagtttttttgaatattgtttgtttattaagcggagttttgtttatatttatagtttttttttttttttaggtatttagtattgagtagtgggagtggggttcgtggttagtttttttagttttttttgagaatttttgggaggttttttgtttttttggggttgtaatgtttattttagttatcgagtaggaaaagatttattataattatttaataggatgtttttaggttttagatttttgaaaggaaaaataataagtattagagtgtgggtattttgggtaggtaggatatattggtatttgggtcgatttttcgggttaattaggtttgagtggttatagtgtgttttttttttattttttggtttaggttgtttggtttgagttaaaatgatttttagttaatttttttttttttagtaatttaaagtaatattgtcgtttgttataggtattttttaattttggagggtgattgggaaagttaggaaaaggttagttatggtttttgtttatatattaatgattgtaggtttgaggatattttaaggttgagaagattttgtaggttttaggaagttttgaaggtagaatagggtttggaatgaagggagttgtgtaattgggaagagaggattaaaggggagaaggtggggatataggaaaaagattttttttgggatggggtttgtaggagattggtatattttttaatattagttacgttatagtttgggagaaagaatagttacggggtatggtataggtgtggttgttttattttgtttttaatgtttttttttttgatgataggattttgtttataagtaagggagtttttgtatttttaggatgaggggagagttagtagaggagttgtttttataggaaaaggttttttttatgggtaaaagaatagttaagaggagagtgtgtgtaatttagttaagttatggggtaaatagtatataggatttggatggaggttttagtttttaattatttagttttgtttatttaattgatggtagttgtttttatgcggagtggttaatgtatttaaatttagttagtgagttttattaaatgataattggtgtttgtgtatttttatttattataaaatatttttgttgttgttatttaaatggtatttttttgatgtgttaataattttaaataagggtagtagttattattttaataagtcggttgttattaggttagtatggtagtttattagtgggtattggttagaacggagtttaaagagaggtcgtggtgagtggttatagttagggaggaggtattgtggttttttttttttcggaagaagacgagttggaatttggagggtttttttttttttttttaaataaaaggtaattacgtagagaattttttgtttaatttttagggaaaattttgattttttttatttgaatgaaaataaaatagaaatataaatggggggatggtatggggggaagggtatgttattaagattatttttttttgtttttaaaatttttttggttttaagatgagttttattgtaaaggtttttaaattgggttgcgtgtcggggtttgttaggatcgagtagggggtttttttttgttcgtagtttgaagggtttggatttttttatattaggatgttttgttttggtattttttgggattttttttttatttgtttttttttaataattttttttttaagttatagaagaaaagtagtttttttttttttcgagtatgattgtagcgatttattttagatgttaaaatttttgtttttaaaggattgattagaaatgagatttattattaattataatggtaattcgatagaagaagttattttattttattttgagacggagttttattttgttgtttaggttggagtgtagtggtgattttgatttattgtaatttttaggttaaagcgattttttagttttagttttttaagtatttgggattataggcgcgtgttatcgtattcggttattttttgtatttttagtagagatagggttttattacgttggttaggttgattttaaattattgattttaggtgattcgtttgttttagttttttaaagtgttgggattataggtgtgaattattataatcggttagagaagttattttaatatttagagatttacggttaaggagaattttaaaaatttttgtatgtatttatatatttgttttagagatgtacgttaattagtgaaagatttttaggtaaaaaaatatattattaatattttggggggatggagagagtgaaggaaatgatagaaaattttttattattaaagagttttttgtgtattttttggataaatgtaggtggaaattaattggttatagtaattagagattttattggattttttgaggagtgtaatgtaattgtttaattttaatatattaaaaattgttattattttaatatgatggaatattttaaatgtttatttaaaatgtagtattatagagattttttaaaatttttttagaaggattgggagaaaaatttgaagggtattgtttattgtgagtggaatttggatttttggttttataatgtttaggtttttgtgggattgaggtgggtggggagagggggtgaagattagagtaagttgaggatagtatggagtgggattatgggttatttcgattttgtttgtgggtagtgattcgatttaagtttttttaggattgattttagatagcggttattaggtttttttttagtttttttggttgttgggatggaggtaattggagggagtagtggttacggttcgttttttttgatttgaaggagtagttagttttaggaatattattttatttgtttggtttttttaaattttggaggttggagaatattggttagagggtggtttatttcgtttttttagtgtcggaggttttagttttttggagtggaaagtttgtttgattttgtatttttttttggtgttgattagggttgatttttagagcgatggtaattatttgttcgagggtgtggaggggttggttttattttttcggatttagatttggaagtttttggtgttttttatttatcggtagacggtgtttttacggtggaggttttttaagtcgtagaggatttttgtcgtataaaataaggttcgttttttttcgaagttagggttgtttatgttgtagatgtggaattttaggttatttttatttatgatggttaggattaagtatagtgtatttttggtttcgtaggtataggttaggttgatttgggagtataagaatagtgttatggggaggttgtgataatggttatttatttttatttttttttttaggattttgggagttggggtgtgagggaatagaggagttttattttgtttttttgtatttagatggtttttgcggtgattttgtttgcggtttttttggttgataaggggtttatatttgttttttttttttagtggattaaggtgagaaggttaaggcgggttagggtaggttagtatttcgattttttagtgaatttaatagaatggcgtttgtgttttttttatagaagtatatgtgtgtattagttggggaagattggagggtgtttttttggttagttagaaaagtagggtttatttgtttttttgggtatgggagttatttttatagggttaagtaagggtgagttggaggggtagtggggttttgggaagtggaatatggtttggtaaaggtttttttttgtatgtaggatgtgtttagttgatatggtttggttttgtgtttttatttaaattttattttgaattgtatttttataatttttatgtgttgtgggagggattagtgggagataattgatttatgggggtagttttttttatattgtttttgtggtagtgaatatgttttatagatttgatggttttataaggggaagtttattttatttggtttttattttttttttgttatcgttatgtaagaagtgttttttattttttgttatgattgtggggtttttttagttacgtggaattgtaagtttattaaattttttttttttgtaaattgtttagttttaggtatgtttttattagtagtgtgaaaacggattaatagagtaaattggtattagaagagtgaggtattgttgaaaaaaatatttaaaaaggtagatatgattttggaatcggtaataggtagaggttggaagagtttgaagggtttagaagataggaaaatgtgagaaagtttggaattttttagagatttgttgaatggttttgtttaaaatgttgaaagtgatatggataataaagtttaggttgaggtggttttagatggaaacgaggaatttgttgggaattggagtaaaggtgatttttgttattttttagtaaagaaattgttggtattttgtttttgttttagagatttttgaaattttgaatttgagagagatgatttagggtattttatagaagaaatttttaagtaataaagtatttaaggggtgatataggtgttgttaaaggtatttagttttgtaagggaaggagagtataaaggtttggaaagtttgtagtttgataatgtaatagaaaagaaaattttattttttgaggagaaatttaggttggttgtttaaatttgtataagtaataaggagttgaatgttaatttttaagattatggggaaaatgtttatagggtatgttagaggtttttatagtagttttttttattataggtttaggggtttaggaggaaaaagtggttttacgggttgagtttagggttttcgtgttgtgtgtagttaagggatttggtgtttagtgttttgagttttagttgttttattcgtggttgaaaggggttaatgtagtgttcgagttatggtggaagttttaagttttggtagtttttatgtggtgttgagtttgcgagtgtatagaagttaagaattgaggtttgggaattttcgtttagattttagaagatgtgtgaaaatatttgaatgtttaggtagaagtttgttgtaggggcggggtttttatggagattttttgttagggtagtgtagaagggaaatgtggggttagagattttatatagagtttttattggggtattgtttattggagttgttagaagagggttattgttttttagattttagaatggtagatttattgatagtttgtattgtttgtttggaaaatttgtagatatttaatgttagtttatgaaagtagttaggagggagacggtattttgtaaagttatagggatggagttgtttaagatcgtgggaatttacgttttggtatcggtatgatttggatgtgagatatgaggttaaagagattattttagagttttaagatttgattgttttgttggatttttgatttgtatggggtttgtagtttttttgttttggttaattttatttatttggaatagttgtatttatttaatgtttgtatttatattgtatttaggaagtaattaatttgtttttgattttacgggttcgtaggcggaaaggatttgttttgttttagatgggattttggattatgtatggatttttgagttaatgttgaaatgagttaagattttgggggattgttgggaaggtatgattggttttgaaatgtgaggttatgagatttgggaggggttaggggtagaatgatatggttgggttgtgtttttatttaaattttattttgaattgtatttttataatttttatgtgttgtgggagggattcggtgggagataattgaattgtgggtagttttttttatattgtttttatagtagtgaataagttttatgagatttgatggttttataaggggaaattttttttatttggtttttattttttttttgttatcgttatgtaagaagtgttttttatattttattatgattgtgaggtttttttagttatatggaattataagtttattaaattttttttttttgtaaattgtttagttttagttatattttaattagtagtgtgaaaatggattaatatattggtttatttggtaaagggttattaagagagggggtttagttttttgttggtggagtttagatatttaaggttttgtgaagtaaggttatggtggggtaggaggggtaaattatattagaaggtaatttttttttatatagggaggtggtatatatgaaattcggttatcgtgggttaggttgggaattggttgtgtcgtaaaattggtgtattaatattagttatttttgaggaaaggagataaaatggtagttaaggatgagtaagtttatggggattgtgtttttgttgtaatggttgtagttgtttttttttttttatatttgtttaggtgattatcgagaaagggatttaggaggtgatatcgtgggaattttttgtcggggtcgtggatggggtatagttaaagaaggtgtagttatcgtaattgaaggtttttaaagacgtgttatttagttttgtgaattatatgatttttttttttgagtagaattcgttagtattgtttttttagagataaggttttataggtagtatttaggggtttttgttgaagcggttggtagtggggaggaaggtttcggatttaagaaggttcgtagttgaaatgatggttgaagttagttttatttgttttatttttatatattatggtattgtttatatttgtattttcgataaggttggtagttgggggtggtttgggatgagattttaagatgtaaatttttattttttgggagtgttattggtttgtagtggttttgtttgtttgttttgttttgtttttaataaagttttattttgttatttaggttggagtgtagtggtatgattttagtttattgtaatttttgttttttaggtttaagtgatttttatgttttagttttttaagtagttggaattataggcgtttattattatgtttaggtaatttttgtatttttagtagaaatggggttttgttatgttggttaggttgattttgaatttttgattttaagtgatttgtttgtttcgattttttaaagtgttgagattataggcgtgagttatcgtgttcggttttgtagtggtttaaagatggaaaataatttttatttatggggattgattatatggattatgttttatttttttaggagaatgatgtttaattttaaaaaggggtgtgattagaggtttggatggagaaaaagatttataatgtaagggaaaaatatttttttataagaggtataggaagattttattggttaagaataataaagtttgtgtatgaataaaatatgtttggagtgattatttaaagagggaagtttttcgttttattgtgtatttttttgtgttgtttaaatttttattttgtgtatatattatttttaatgtatgtatgtatttagttttagagatgaggttttgttgtgttatttaggttggggtgtagtggtacgattatagtttattgtagtttcgaaattttgggtttaagtaatttttttgttttagttttttgagtagttgggattataagtatgtattattgtatttagttttattttttataatagtgtgtagtagaagatattagagttgattaaatatttatgtattttatattttttagttttttttgaaattaatttgtttttgtgttgattggttttggttggtagattgtgggtgaaattgaggaatatttgtttagtagaggtagtggaaagtttttgtgtggaatttttagtatttatttttaaggttttagatggggtagttgttagatggaggagggtggtttaatttgattggattttaggtgagtgatagatgaatttttgttgtatttagttatttagggtttggggtaaatgtgttattgtagtagggtttagtttagattgattaatataatgtatatagatttgatagtgttattttaggatgttggtattaaggtttttattacgatggtattagtttagagggtttgtggaatttatagtttttagtttgggtttaggtgaattttttttgtttattgaggagtttataaagtggtttaggagaatagaggcgtcggttttatgtatagtagggagttaggtattggtcggttttggggatgggataaagttagttatagtcgattataatgggtcgtgtgatggaggaatgttttgcggtttttttgtagtttagcgttgttattggtatttttttttttaggggtggggatcggtcgtattagaggattacgttttttcggagggagggaagttttagtttatagaagggcgagtcggttattgggtttagatgtttatttattataaattgattgttgattttttcgaggatttgttttttattgagggttatggattttttttttttttttttgattttttttttttttaagcgtttgtaggtatatattttattcgtggttcgaatttggtaggtatagatttgtagtgtaagaaagaaattagggtggtaggagtatcgtggaggtttgtttcgagtttttttagggcggggattataggttttttaggtagagaatggatggggttagagtcggttttgtttggttttatgagtgttttaggtttttaggatttagtgatgtttggtttggggtttatagttgttttgggtttttgtttttttttttttttttttttaaggatttttagttttggaaggggtagaatgagttatttatattaaggtttagataattgattggggttttaagtatcgttttatttttagggtaataggatttttttttatcggttgtcggtagagaagtttgttttgggaggtagtgataggagatttttaagaatattgattttataatttagataagcgggaattaaagtatttgggtttaagttttagttttgttttatattgtttgcgcgtttttggttgggttatttaattattttggattttagttttttttatttttaaaatgggaataataaggtttgttttatatgttgggaagatcgggtaatgtataacgaaatttcgaattttgtatgatagcgttatttaggtattgagtggttaaggttgtttagtttttttacgtttttatattttttttttatatacgattagggttgtttatttgttttttgtaggttggattttgtttgaggttggtaggagagtacgtttgttttatttgtttagttttataatttttttttattatagatatatttgatagttttaaggttattgatttttttttatttttattgttttcggggtttatattgagttattggtgttttcgggggattcgtgggttaattttttaggttgatttagaagggataggaaaggtgatttgaatgtaagaatttttaattaaaaacgtgaatgtttatttattttttcgaagttttttttttttagtattcgatattgtttgaaagtgtttttggttatcggttgtttg

SEQ ID NO: 109 - DNA, 5096 bp, Artificial Sequence
  chemically treated genomic DNA (Homo sapiens)
gaggtcgaggcgggcggattatttgaggttgggagttcgagaatagtttgattaatatggagaagttttatttttataaaaaatataaaattagttaggtgtggtggtgtatgtttgtaattttagttatttggtaggttgaggtagaagaagagtttgaattcgggaggcggaggttgcggtgagtcgagatcgcgttattgaattttagtttgggtaataatagtgaaattttgtttaaaaaaaaaaaatgtttataattgttattttataagaaaggaaaaagtttttaaagagatatataaaaaggatatttatagataaaagaaattttatatttaggaggttattagattgattataaaatatattcggattttaaaagtattagaatattaggagagaaaaaaaaaaaattaggttaggtacggtggtttacgtttataattttagtatttttggaggttgaggtagatggattatttgaggttaggagtttaagattagtttggttaatatggtgaaattttgtttgtattaaaaattagtcgggtatggtggtaggcgtttgtaattttagttatttaggaggttgaggtaggagaattatttgaattcgggaggtagaggttgtagtgagttatgatcgtgtcgttgtattttagtttgggtaataagagtaaaattttgttttaaaaaaaaaaaaaaaaaagaagaagaagaaaagaaaagaaaattattgttaatttttattatattttgttaaatatatattttgttatattatttgttttagttttaaggttattggtattttttgaagtaattattaaatgtttttattatttaagaatagagagttaatggtgataattaatttatatagagtattgaaaggagttaggttttgtttgtttttttttgtatagtaattttgtaatagtattataaggtaggtattgttattatttttattttataaataagaaaattggagtataggttgggcgcggtggtttacgtttgtaattttattattttgggaggcggaggtgggtgtattatttgaggttaggagtttaagattagtttggttaatatggggaaattttatttttattaaaagtatgaaaaaattagtttggcgtggtggtatatatttgtaattttagttatttcggaggttgaggtaggataatcgtttgaattcgaaaggttgaggttgtagttagttgagatagagtttttgtatttaggtttgggtgatagaatgagattttgttaggaaggaaggtgatagaatgagatttcgttaggagggagggagggagggagagaaaagagggagggagattggagtatagagaagttaattgatttgtttaagaagggagggagggagggagagagggagatcggagtatagagaagtgatttgtttaggaaggaaggaaggaaggtaggaaggaaggaagggagggagggaaggaaggaagggagggagggagggagggaaaagagggaaggagattggagtatagagaagttaagtgatttgtttaagaaggaagggagggagggagattgaagtatagagaagtgatttgtttaggaaggaaggaaggtaggaaggaagggaggggcggagggagggaattggagtatagagaattgatttgtttaaggttatttagtagaaggaagggaggaaggaagggaggaaggaagggagggagggagattggagtatagagaagttaagtgatttgtttaagacggacggatacggacggaaggaaggaataaagaaggagggagggagggagggagggaattggagtatagataattgatttgtggaaggaaggacggaaggaaggagagagggaacgaaggaaggagagagggaaggaaggaaggaaggagagagagggaaggaaggaaggagagagggagagagggagggaagggagggaattggagtatagagaattgatttgtttaaggttatttagttaggatttgagtttagaatgtgagtgtttttagttattatattgaattgttttttagttgagaatttttaataaatgtattaggatatatataattggatgttataaggtggttttcggttaatttttttttttaaatatatgtattaattttaaattatttatatgataaaaaatgtttatatttttatcgatttcgtttttaaaatggtatggttttttaggattattttttataatcgttaaagggaaattcgttttgttaatatgaaaaaaaaattaaatatttgttttatgagttgttagtggttaacgttgtttagattacggtttgaacgtattattttttaaagattattttgtggttttgggtaaattgtttagttttttttgtttttttagcggtaaagtggatataataatagtattattttttaaagtggtgaggattagttgatattatttatataaattgttatgtatagtatttgatatagagcgagtgtttaataaatgttttttattatttaggttttgggtttttttatttttagagtgtaagttttttagtaattatagaaacgttttttagagtcgttgtttattttttaaaaatatttgtttttatttcgtatagagtatagtgatattataaataggtttttttggattttagttttgggggtggttatattatttcgtttaggtttaggaagagagagtcggttttggttttttattcggtagtagtataaaatttaattaggattttttatttcggttaatttttgaattatcgcgtttagtttggttggttcggtagtagatggaatgagggcgtcggcgttaggaagtggcgtttatttatttgtttagttcgaggtgggtattttttttttatagtattttcggggatttcgtttttttatcgcggaacgttttagaggatcgatttaatagtgttatagggtgggtttttttttaaattttttaaaatatatcgttacgatttcgaaacgggagtcgagggagacgtattaagtgtttttcgacgttaggtgaagcgtattatatttggtgtgcgtgttgagtttcgaatcgaagttcgtgcggtcgttatttttgtttttttgttgggggttttagagagtgtgttttttgtttacgtgcgcgtagggttcgtagtcgtttttacgttttagcggagttgtagtacgttttttttatttattaggtgaagagtttgttttttattttgcgtagtaggttggagaattcggtcgtcgtttttttcgcgaggggttttggggcgtcggggttcgttggcgagtttgtttttatcggcgtttttgcgcgttttcggcgtttaaaattttcgaagtgtcgggtttcggaagacgggaggcggtgtttgtgcggtcggttggggtttcgttttggttttgcgttttttttttcgtttttttgttcgcgtttttttcgttttttcgttcggtttttttagcgattaattattaattgttaagttttaagggttagataatatatttgtagattataatttggtatttttagggtggtaggaggagaaagggtaatttttttttcgttttggtagtcgagttttattgttgagcggtatttagtgtgtttttaggtttttagggttttttgtttgaaattataagatatagtgatacgaggttattgtaggtgatttttaagttaagaagcggtgagtgagtagtgagttagaagtagtgagtgagtcgggatttttttaattggaaggattggttgattttttttttttttttttattttttttttttttggttgatttgtataaaatcgttttattaaaataattgaaggttggtagggcgcgttggtttatatttgtaattttaacgttttgggaggtcgagacgggtggattatttgaggttaggagttcgagattagattgggaaatatggtgaaatttcgtttttattaaaaatataaaaattagtcgggcgtggtgacgggtgtttgtagttttagttattcgagaggttgaggtaggagaatcgtttgaatttaggaggcggcggttgtgagttaagatcgcgtttttgtattttagtttgggtaatagagggagacgtcgttttaaaaaaaaaaaaaaaaaaaaaaaaaatttgaaggcgttttaggtttgtgtcgtttttttttgtaaaatatgggtaagattttaaaaagattttggaaacgtgtttttgtggcgtggatggaggcgtggtttatttttcgcggtgtgttggttttgttttttagtatttagttgttttcgtcgtgttagggagagagacggtgttaattttcggcgttcggtttggatgttttgttttggttacgtttttcgaggtttttacgggttaaagagggattaagagatattaagttggggtcgaaaagtttttgttattgattttttgttttcggaaaggaggagatttagaaaataaaagaaaaggtgttgggattttttatttttttttggttatttgttttgggggttggggtgggttaaaataaacgtaggtttaaatagataggttgtgtagacgagttggtaattttgtaagaggagtttaagaaaaaaaatagttttcgaaaatgaaatattattttaggaattttaagtttagtagttgtaggaattttaaaaaaatttttgaaattaagaacgtggttattcgtagagattaattaagtattataatataagtatattatgaaataagaggatattagaagtatatttaagatgttatttttgtaaagtaaataatttatttaattttgtatattgataacgttgaattttatttgagttttgtgtttttggaaagtaatgataattaagaaatttttttaggtcgggcgcggtggttgacgtttgtaattttagtgttttgggagatcgaagcgggcggattatttttgaggttaggagttcgagattagtttgattaatatggcgaaatttcgtttttattaaaattataaaaattagttcggcgttttggtgtgtgt

SEQ ID NO: 110 - DNA, 5096 bp, Artificial Sequence
  chemically treated genomic DNA (Homo sapiens)
gtatatattaaaacgtcgggttaatttttgtagttttagtagagacgggatttcgttatgttggttaggttggtttcgaatttttgattttaggagtaattcgttcgtttcggttttttaaagtattgggattataggcgttagttatcgcgttcggtttaggaaggttttttaattgttattattttttaggagtatagggtttaggtagaatttaacgttgttaatatgtagggttaaatgagttgtttattttataaaagtgatattttaaatgtgtttttaatgtttttttgttttataatatgtttgtattataatatttaattagtttttacggatgattacgtttttagttttaaaggtttttttgaggtttttgtagttgttaaatttggggtttttgaagtaatattttattttcgaaagttgtttttttttttagattttttttatagaattgttagttcgtttgtatagtttgtttatttgaatttacgtttattttgatttattttaatttttaaagtaggtggttaggaaaaaataaaaggttttaatatttttttttttgttttttggattttttttttttcggaagtagggggttagtgataggaatttttcgattttagtttagtgttttttaatttttttttagttcgtggaagtttcggaaggcgtggttagggtagggtatttaagtcgagcgtcgggggttggtatcgtttttttttttggtacggcggagataattgaatattgaaagataaaattaatatatcgcgaggaatgagttacgtttttatttacgttataaaggtacgtttttaagatttttttaggattttatttatgttttgtagggaaaagcgatatagatttgaagcgtttttaggttttttttttttttttttttttttttaagacgacgtttttttttgttgtttaggttggagtgtaaaggcgcgattttggtttataatcgtcgttttttgggtttaagcgatttttttgttttagtttttcgagtagttgggattataggtattcgttattacgttcggttaatttttgtatttttagtagagacggggttttattatattttttagtttggtttcgaatttttgattttaggtgatttattcgtttcggttttttaaagcgttgggattataggtgtgagttaacgcgttttgttagtttttagttattttaatgaagcgattttgtataaattagttagagggagggagagtgggagggaagaggaggggttagttagtttttttagttaggagagtttcggtttatttattgtttttaatttattgtttatttatcgttttttagtttaggaattatttataataatttcgtgttattgtattttgtgattttaaataaggaattttaaaaatttgaaggtatattgggtgtcgtttaataataaggttcggttgttaagacgaaaaaaaaattgttttttttttttttgttattttggaggtgttaggttgtaatttgtaaatgtattgtttggtttttagggtttgatagttaatgattggtcgttgaaggagtcgagcggaggagcgagagggacgcgagtaagagagcgagggagggagcgtagggttagagcggagttttagtcggtcgtataggtatcgtttttcgtttttcgggattcggtatttcgggggttttgggcgtcggagacgcgtaagggcgtcgatggaggtagattcgttagcgggtttcggcgttttagagtttttcgcggagggagcggcggtcgagttttttagtttgttgcgtaggataaaaggtaaattttttatttggtgagtggaaggggcgtgttgtagtttcgttggggcgtgggggcggttgcgggttttgcgcgtacgtggataaggagtatattttttgaggtttttagtagggaggtagaggtggcggtcgtacggatttcggttcggggtttaatacgtatattaggtatggtgcgttttatttggcgtcgggaagtatttggtgcgtttttttcggttttcgtttcgaaatcgtggcgatgtattttggaggatttggggggaaatttattttgtggtattattaagtcggttttttggggcgtttcgcggtggagggacgaggttttcggggatgttgtgaaggaggagtgtttatttcgggttgggtaggtgggtgagcgttattttttggcgtcggcgtttttattttatttgttgtcgagttagttagattgggcgcggtgatttaagagttgatcgaagtgagaaattttggttaagttttgtgttgttgtcgggtgggagattagagtcggttttttttttttgggtttgagcgaggtgatatagttatttttagggttggggtttagggaagtttgtttgtggtattattatgttttgtgcgaagtagggataaatgtttttaaggagtgggtagcgattttagaaagcgtttttgtggttgttggaggatttgtattttggaaatgagagaatttaggatttaaatagtgaaagatatttattgggtattcgttttgtgttaggtattgtgtataataatttatatggataatattagttaatttttattattttaggagatggtattattgttatatttattttgtcgttggagaaataaagaaggttaagtaatttgtttaaggttataagatgatttttaaggggtgatgcgtttaagtcgtagtttaaatagcgttggttattgataatttatgaaatagatatttgattttttttttatattaataaagcgaatttttttttaacgattgtgaaagatagttttgaaaagttatattattttaaaaacgagatcgataaaggtgtaagtattttttattatataaatagtttgaaattgatgtatgtgtttaaaggggaaagttggtcgaaaattattttgtagtatttagttgtgtatgttttgatatatttgttaaaagtttttagttgggaggtaatttagtgtaatggttaagggtatttatattttggatttaaattttggttgggtgattttggataagttagttttttgtgttttagtttttttttttttttttttttttttttttttttttttttttttttttttttttttttttttttttttttttttttttttttttttcgtttttttttttttttttttcgtttttttttttataagttagttatttgtattttagttttttttttttttttttttttttttttttgtttttttttttcgttcgtgttcgttcgttttggataagttatttaatttttttgtgttttagttttttttttttttttttttttttttttttttttttttttttttttgttgggtgattttggataaattagttttttgtgttttagtttttttttttcgtttttttttttttttttgtttttttttttttttggataagttatttttttgtgttttagtttttttttttttttttttttttggataagttatttaatttttttgtgttttagtttttttttttttttttttttttttttttttttttttttttttttttttttttttttttttttttttttgtttttttttttttttttttggataagttatttttttgtgtttcggtttttttttttttttttttttttttttttttggataagttaattaatttttttgtgttttagtttttttttttttttttttttttttttttttttttttttgacggagttttattttgttatttttttttttgatagagttttattttgttatttaggtttgagtgtagaggttttattttagttaattgtaattttaatttttcgggtttaagcgattattttgttttagttttcgaagtagttgggattatagatgtatattattacgttaggttaatttttttatgtttttagtagagatggggtttttttatgttgattaggttggttttgaatttttgattttaagtgatgtatttattttcgttttttaaagtagtgggattataggcgtgagttatcgcgtttagtttgtgttttagtttttttatttgtaaaatggagataataatagtatttattttgtagtgttgttataaggttattatgtaggaaagggtagatagagtttggttttttttagtgttttatatgggttagttgttattattagttttttatttttgggtgatgggaatatttggtgattgttttaggagatgttagtggttttgaggttggggtagatgatatggtaagatgtatgtttaataagatgtgataagaattaataatgattttttttttttttttttttttttttttttttttttttttttgagatagagttttgtttttgttgtttaggttggagtgtagcggtacgattatggtttattgtaatttttgtttttcgggtttaagtgatttttttgttttagttttttgagtagttaggattataggcgtttgttattatgttcggttaatttttaatatagataggattttattatgttggttaggttggttttgagtttttgattttaggtgatttatttattttagtttttaaaagtgttgggattataagcgtaagttatcgtgtttggtttgatttttttttttttttttttaatgttttgatatttttggaattcgggtatgttttataattagtttagtagttttttaaatatgagattttttttgtttatgaatgttttttttatgtatttttttgagggttttttttttttttgtggaatagtagttatgggtattttttttttttagatagagttttattgttgttgtttaggttggagtttaatggcgcgatttcggtttatcgtaattttcgtttttcgggtttaagttttttttttattttagtttgttaagtagttgggattataggtatgtattattatatttggttaattttgtattttttgtagagatggggtttttttatgttggttaggttgttttcgaatttttaattttaggtgattcgttcgtttcggtttt

SEQ ID NO: 111 - DNA, 3072 bp, Artificial Sequence
  chemically treated genomic DNA (Homo sapiens)
ttttaatttagcgggacggtttgtatttttatttgttaaatttggtaatttttggggttggggtttggggttcggtaatttttggggtgggaggtttttgtgtagagtttaatttgttcgttaaggtttatttatcggagaagaattggttgatggaggtgggtaggagcgtgaggaaggttaaggggtgggcgaaggagatggaaaggatagcggagatgtaggttacgtcggttattatggagtagaggtaggttagggaggtgtagaggtagaataggacgaagttgcgtatgtttttgttgtcgatgtagttgtcggtgaagaaatagtgatggtcgtgttttagggtgattttggcgtatattcggtagaagtgggtgttaggtgaggggtatggagtttttttggtcgaggttttttggtaggtttttaggtcgtttggggagttttggatgataaggacgtaattgtttagggcgttggtcgagaggaataggaagagcgtttcgtggagtagggcgggcgagaagagtcgggcggtcgcggggttttcgcgtatgttgggtaggaagaggaagagttgtagtacgaaggttattagggagatgtataagaagtaggcgggggttattacgttgagtagtcgtagggttagtattttcgattatatttttgcggggttcggggtgagaagaggattgattgattacggcgtttagggggcgttttcgttcgttttttcgtgtcgcgcgtttggggtattgtacgcgattttacgtttttaattttttgtttcgcggattttttttttttagttttttaatttcggattaggtaggttagagattcgagttcgtagcggtttcgggtttaggttttatttgggggtgagtgttgtttggggttttgagcgagttcggcgttttggcgcggtagagtttggtataggagggagggattcgtttgtagtttttaggagttgtgagggtggggggtatcgggggataggattttttttttttgtggatgtggaaataagtttaggtttgggatttttggtttagatttttttaggaggagaaagggaaggatttggggtcgggggtaggagaattagcggtatttgatttgttggaaattttgttttatattttttttttttcgtttttgcgtttttatttatatatatattttgggtagtatttagggattttattaggttatttaaggttttttggaggtatgtgtgcgtgagggattacgatgtgtgtgtgtgtgtttttgtttgtgattttgtacgtgtaatttgtgtgcgtttgagtatttgtatttgtgtatgtatatatttgcgtgtatagatacgtagtttttgttatttagttttaaaaaaattaattgaaataatcgatatatttatattcgttttcgggtatcgggtgaggtgggggcgtaattagaatatttgtgttagcgggttttggttagtatatttttttaacgttggttgttcgggttatttttttgcgaagagcgtttttatttgaggcgaaattaaaatttttttttcgcgttcgtttttcgtttttttgttgagagaaatttaaataatttttatggcgtcgaaattttttttatgtcgataagttcgttttgggcgtacgagtggatgtttggttagttttttttgggatcgatttcgtcgtcgtgtttagtttttattacgtttttattttattttacgttttatagtcggggtttttggttagtttcggaagttatcgagaaataggatttcgtgcgttcgagagaatttttttaggggttaaggaatcggttagtcggaggcgcgagaaaagttttgggaaggcggttgtatttaggatgggtggatgttacggggttttcgtttaggttgtttcgttcgtacgggtcgattggttattttggaattttttttgtaggttttagcgtttttcgggaattcgtagttttcgcggagagcgtgggtttttttttatcgttggggcgtagcgtagtgtacgtttgagggtggtcgtcgggggttgggtacgtttttagttttgcgtcgtcgggggttgcggcggtgttgtttattttagagagttttcggtttggggtttcggcgaagtaagtgttttttcggcgtcggtcgttaggggggcgcgggagtagttagatgcgtcgtagcgttgggaaggcggcgaaggataggggttaggggagtgaggggcgttcggtaggtagttttagttttggttttgcgcgggagaagggatagtagagatcgttcgtggggtttcggggtgtagggagttgttcgtttagttttggcgttcgtttcgttcgcggtagagggcggtatagtcggagttttggaaagatcggtagcgtcggtagtcgcgggtttttcggttattgtttttcggacgtacgggaagtcgtttttcgcgtcgtcgtcgtcgtattgtcgtcgtcgtagaggggtgaggaaattaatttatcgagttttggtcgtcgataagaggagtttcggacgtcggttttcgttttgttcgaggttgtaaagttgtggattcggttcggttggttcgtagtttgcgtttcgtttcgggaattgggtaagtagcggggatgtggggaggagggagcgggtagttgttggttttttatttgggcgttagcgagtaagggttaggaagcggcggggatggtagttgggtattttttagtttcgttattttttttttcgtttttgggggcggtgttttggtcgttagttttagtatcgtggatttgttttttttttttttttcgattttttttgagcgggttggggcgttttgtttggttttagcgttcgttttagttgggagattgggatttagttttgatgtggattttttagttattattttgtttttttttttcggttaggttttacgattttttttgttttttattcggattgaaggaattttgggggtttgagaggttagtttgttagggtaatatttatgaagattagcgttattttttcggaagggttgt

SEQ ID NO: 112 - DNA, 3072 bp, Artificial Sequence
  chemically treated genomic DNA (Homo sapiens)
atagttttttcgaggagatgacgttgatttttatgggtgttgttttggtaagttgattttttaagtttttagggtttttttagttcgagtggagagtagggaaggtcgtgggatttagtcgagagggaagggtaggatgatggttggagaatttatattagggttgaattttaattttttagttggaacgggcgttgaaattaggtagggcgttttagttcgtttaaggggaatcgagaggggaggagggggtaagtttacgatgttgagattggcggttagagtatcgtttttaggagcggagggaggggtggcggggttggggggtgtttagttgttattttcgtcgttttttggtttttattcgttggcgtttaagtgggaagttagtagttgttcgtttttttttttttatattttcgttatttgtttagttttcgaagcgaagcgtaggttgcgagttagtcgggtcgagtttataattttgtagtttcgggtagggcgagagtcggcgttcggggttttttttgtcggcgattagagttcggtgagttgatttttttatttttttgcgacggcggtagtgcggcggcggcggcgcggggggcggtttttcgtgcgttcgggaggtagtggtcgagaagttcgcggttgtcggcgttgtcggtttttttaaggtttcggttgtgtcgttttttgtcgcgggcgaggcgggcgttagggttgaacggatagttttttatatttcggggttttacgggcggtttttgttgttttttttttcgcgtagggttagggttgaggttgtttgtcgagcgttttttatttttttagtttttgtttttcgtcgtttttttagcgttgcggcgtatttggttgttttcgcgtttttttggcgatcggcgtcgggaaggtatttgtttcgtcggagttttaggtcgagggttttttggggtgggtagtatcgtcgtagttttcggcggcgtaggattgggggcgtgtttagttttcggcgattatttttaggcgtgtattgcgttgcgttttagcggtagggagaggtttacgtttttcgcggaggttgcgggttttcggggggcgttgggatttgtaaaggggattttaaggtgattagtcgattcgtgcggacgggatagtttggacggaggtttcgtggtatttatttattttaggtgtaatcgtttttttagaatttttttcgcgttttcggttggtcgattttttagtttttggaaaagttttttcgggcgtacggaattttatttttcggtggttttcgaagttggttaggaatttcggttgtgaggcgtggggtgggatggggacgtggtgagggttgagtacggcggcggggtcgattttaggaaaggttggttaagtatttattcgtgcgtttagggcgggtttgtcggtatggaaaggatttcggcgttatgagggttgtttgggttttttttagtaggagggcgggaggcgggcgcgaaggggggattttaatttcgttttaaatgaaaacgtttttcgtaaagaaatagttcgggtagttagcgttggagagatgtgttggttaggattcgttgatataggtattttggttgcgtttttattttattcggtgttcgagagcgagtgtgagtgtatcgattgttttaattgatttttttaaagttagatagtagaggttgcgtgtttgtatacgtagatatatatatatataaatatagatatttaagcgtatatagattatacgtatagagttatagataaggatatatatatatatatcgtggttttttacgtatatatatttttaaagagttttgggtaatttggtgaggtttttgagtgttgtttaagatgtgtgtgtgggtggggacgtagggacggagaaaggggagtgtgaagtaggatttttagtaggttaagtgtcgttgatttttttgttttcgattttaaatttttttttttttttttttagggaggtttgaattagaaattttaaatttgggtttgtttttatatttatagaggggaggagttttatttttcggtgttttttatttttataatttttaaagattgtaaacgagttttttttttttgtgttagattttgtcgcgttaaggcgtcgagttcgtttaaaattttaggtaatatttatttttaggtggggtttagattcgaggtcgttgcgggttcgggtttttggtttgtttgattcggggttagggaattggggaggggaaattcgcgggatagggggttgggggcgtggagtcgcgtgtagtgttttagacgcgcggtacggaggagcgggcgagggcgttttttggacgtcgtagttagttagttttttttttatttcgggtttcgtaggaatgtaatcgaggatgttggttttgcggttgtttaacgtggtggttttcgtttattttttgtgtatttttttggtgattttcgtgttgtagttttttttttttttgtttagtatgcgcgaggatttcgcggtcgttcggtttttttcgttcgttttgttttacggggcgttttttttatttttttcggttaacgttttgggtaattacgtttttgttatttagaattttttagacgatttgggggtttgttagggggtttcggttaggaagattttatgttttttatttagtatttatttttgtcgagtgtgcgttagagttattttgaggtacgattattattgtttttttatcggtaattgtatcggtagtaggaatatgcgtaatttcgttttgttttgtttttatatttttttggtttgtttttattttatggtggtcggcgtggtttatattttcgttgttttttttatttttttcgtttattttttggttttttttacgtttttgtttatttttattagttagttttttttcggtgagtgggttttggcgggtaggttgggttttatataaagattttttattttaaaggttgtcgggttttaaattttaattttaaaagttgttagatttagtaaataaaaatatagatcgtttcgttaaattaaaa

SEQ ID NO: 113 - DNA, 3845 bp, Artificial Sequence
  chemically treated genomic DNA (Homo sapiens)
tcgttttttacgtttaagtaatttttttgttttagtttttcgagtagttaagattataggtatgtgttattacgtttagttaatttttttgttttttgtagagatgggttttattatgttggttaggatggtttcgattttttgatttcgtgatttgtttatttcggttttttaaagtgttgggaatataggcgtaagttattgtgtttagtttatattttatttttcgattgattttcgtgattagagttaattttttatgttattttatgtgaatatgtattaatgaattattagaaattgtaatgtttttgtaggttaaaataatttaatattgataattttatatgatttagtttaatatattattttttttattagttatattgtatgttattatttatatatacgtttatttagttagtttatttgttttttgtgaggaatattatatagtttttgagattttgttacgatagaagttagtattgataagtttttgcgtatttgttttaatgtaggattattgggaattgagtagtagtttatagggtttgggaggggatttaattatttagttaatttttatttatattattttttttttttcgataatgggtaattgagaaagggtaaatgtgtgtaaaaattatgtagatgtagttttaggattattttttttttttttgtagtgtttttttttaagttatattagcgtttaaattttggagttattgatgttttcgttatttttgtagatagaatattatgtcgtaaataatgtttatttgtttattagtattatataaaagtgtttgtttttttttattttagttattattgattattggtaaaaattttaatgtatttaattttaataggtaaagaaaggtttttttatttagattttaggtgggggtttaagtttatatttttgttttataaaaattgaatagttagtgtttttgagttgaatgatttatttatttcgtataggagagtttaattatattgtgattttgggggagataatttttataatttatttttttaaaatgtagaaagtagaaaaagggtagaaaaatcgtattaaatttgaataatgtagtatgtttttagagttagggatatttttttttggaaggattttaagtttggcgtatttgtattgattgtggttatggcgtatttaatttttttaaattagtttttttgtatcgtatataggaagatttgagggtgagtgtaaattaggattgtttggttagtggtgtgtgtaaaaatttattgtagaattaagaattatttttttagtattttatatattttaaaaaataggtagatatgtttattgattttaggttgtttatggtttttagaggtttttttttattgtaatagtgttgtggggttttaggggtttagtagttttttttttttaggttatttcggtgagggagggagttgggatttttgtattgcggtaaataagtacgtttgcgcggtcgtagaggtaggttggcgcgtatgtttaggcggggatgtgtgcgaagtttgtcgttgttgtagcgagtttggcgtagagtggagcggtcgtcggagatgtttgacgtatttgtttgaggagcggttagtgacgcgatggagcgggtaaggttagttgtgtcggtggttttttttaagagatagtttggggagcggttatttttatttattagatattttaagtttttaggatttggagtattgaataaacggaatttgggttttaaagttttttgttttggagaattagattcggaatgtttagaggtttgttgttgtgtcgttttgtttcgatggtattttgttcgttcgtattggggcgcgttttttattcgtttttaattgtggtgtcgcgataggttttattgcgggtgtttgcggtgggaagggcggtggtgattgggagtatgcggggtaatcgtagtgggtaagggatatgggtggaggtgggtatattagggtgattgtagtttcgtgtggcgagggtacgtggggggattagtgtatagggattttaggcggaggtaggtatattggagtgattgtggcggggcgaaggtacgtgaagtgatcggtatttagggggtgttgagcgtaggtaggtgtataatagtgattattgcgtggtggagtagggtacgtggggcgattggggggggaattcgtcgtagtgatcgaggcgaggaggttatggtagtggattagggggatgagtcggtgtgatagtggtgggggttgtgttggtggtcgcggcgcggggagagttcgtaggaagtggttgggaggtagggggaaggcggcgatagtgggtattggcggcggtgggtattggtagcgggtaggtatggcggtggtggattttggcggcggtaggtatggcggcggtgggtatggtatggaggcggtgggtatggcggtcgcggggtttgtcgttgttcggagtgattaagggacgttgaatgattgttgtgtagaggagggggtattagaaggggtagtagtatagttcgtagtttttaatttttttgtgatttgcgatggttatttggtttgtttattgtggtggtggtgtttttttattaaaattgcgtaatgtttatattgtcgtaggggttgtagaaatgcgtggaatttttgcgtattttttaggaattttcgttttagaggttatggtataagaagattggaatgatgtgtagaatttgtatttatagattttttgattgataggttaggtgatgtttgggggttattttttttttattgtttttttttgttgggaattaggttttggaaggttatgtcgaaataatttgggggtttgtgttgcgttattgttattgtgtagtttttttaagatggtcgtcgttgtagcggtttagatttgcgtaagcgttttagcgggggggtggtcgttttttttttgtagagtcgttagtggggagggggtaggtggtgtgtgtttagtttttgttgtttcggagttttagtcgtattttttttagggtgtagtggtaaggagaggaagtcggttaaggtgggcggttgttttttttttaaagtgttgtttgggaaaggatgtaggttgcgtagacgtagtagaggtgatagtcgttttcgtttgtagtggggcgagacgtggggtaggggagcgagggtttacgtagtttttgtttggaaggaatggtagtttttttttttatttggttgatatagtagttgttttttttcggttgtggcgtagtagaggggggaggagggagatgggttggcgtaggtttcgtttagtaagtttggtagttattttttatttacggtgtagtagtagaggattggaggggaatgtggttagaggttaggtatttgtattattttcgtttgtgtgggatggtagttgtattgggttattgttttttagttttgtagtaaattagagtggtggcggtttggaggttattaaaggtgtagttattttaagatttgttgtgttgttttagtaagtttttattaatgatagagattttaaattggttttttgattttttggaaaatcgtatttttttatttttgtagttttttttttggttgtattgtgcgttaattttttatttttaaattggatttgttaattttttttttttaattttttgtagtttttgatttttattcgatatatttaataaatgttattatttaagatttagttattttttttaatttttggatagtttattttgatgtattgtatattttttttaaatgggttgggggagaggatatcgtgatggtttttttcgatt

SEQ ID NO: 114 - DNA, 3845 bp, Artificial Sequence
  chemically treated genomic DNA (Homo sapiens)
agtcgggaagagttattacgatgtttttttttttaatttatttaaggaaagtatgtagtgtattagaatggattatttagagattaagaaggataattgaattttaaatggtgatatttattaaatgtgtcgaatggaaattaaagattatagggagttaaaaaaaaggggttaataagtttagtttgaaaatagagaattagcgtataatataattaagagaggaattataaaaatgaaaaggtacgattttttagggagttagaaaattaatttaaaatttttattattaatggaggtttgttgaaatagtatagtaggttttggggtggttgtatttttgatggtttttaggtcgttattattttagtttattgtagagttgaaaagtagtagtttagtgtagttgttattttatataggcggaggtggtataaatgtttggtttttagttatatttttttttagttttttattgttgtatcgtgggtaaggggtggttgttaagtttgttaggcggagtttgcgttaatttatttttttttttttttttttattgcgttataatcggaaaggaatagttgttgtattagttaggtgaaggggagggttgttattttttttaggtaaaagttgcgtaagttttcgtttttttgttttacgtttcgttttattgtaagcggaggcgattgttatttttgttgcgtttgcgtaatttgtatttttttttaagtagtattttggggagggggtagtcgtttattttggtcggttttttttttttattattgtattttaaagagggtacggttgaaatttcgaaatagtagaagttgaatatatattatttgttttttttttattggcggttttatagggaggaagcggttattttttcgttgaagcgtttgcgtagatttaagtcgttgtagcggcggttattttgaaggagttgtataatggtagtgacgtaatatagatttttaggttatttcgatatagttttttaagatttggtttttaatagagagaaataatgaaaaaaaagtaatttttaggtattatttggtttattagttaaaagatttgtaaatgtaagttttgtatattattttagtttttttatgttatagtttttaaagcgagggtttttaaagggtacgtaaggattttacgtatttttgtagtttttgcggtagtgtaggtattgcgtagttttaataaaaaagtattattattatagtaggtaaattagatgattatcgtaggttataggaaaattaaaggttgcggattgtgttattgttttttttgatgtttttttttttatatagtaattatttagcgttttttagttatttcggatagcgataggtttcgcggtcgttatgtttatcgtttttatgttatgtttatcgtcgttatgtttatcgtcgttaaagtttattatcgttatgtttattcgttgttaatgtttatcgtcgttaatatttattgtcgtcgttttttttttattttttagttattttttacggatttttttcgcgtcgcgattattaatataatttttattattgttatatcgatttatttttttggtttattgttatagttttttcgtttcggttattgcgacgaattttttttttagtcgttttacgtattttgttttattacgtagtggttattattatatatttatttgcgtttaatattttttaaatatcgattattttacgtattttcgtttcgttataattattttaatatatttattttcgtttaaaatttttatgtattggtttttttacgtattttcgttatacggaattgtaattattttgatgtatttatttttatttatgttttttgtttattgcggttatttcgtatgtttttagttattatcgttttttttatcgtagatattcgtaataggatttgtcgcgatattatagttgggggcggatgggggacgcgttttaatgcgagcggataggatattatcggggtagaacggtataatagtaagtttttgaatatttcggatttggttttttagaataaaggattttagggtttaaatttcgtttatttagtattttaagttttaaaaatttggaatatttgatgaataaaagtggtcgttttttaggttgttttttgagagaagttatcggtatagttgattttgttcgttttatcgcgttattgatcgttttttagatagatgcgttaggtattttcggcggtcgttttattttgcgttagattcgttgtagtagcggtaggtttcgtatatattttcgtttgagtatgcgcgttagtttgtttttgcggtcgcgtaggcgtgtttgtttgtcgtagtgtaggggttttagtttttttttttatcggaatgatttggggggagggggttattggatttttagggttttatagtattgttgtaatgagagggggtttttagaaattataagtaatttgggattaatggatatgtttatttgttttttaaaatgtgtaaaatattaaagaaataatttttggttttataataaatttttgtatatattattggttaaataattttaatttatatttatttttaggtttttttatgtgcggtataaaaaagttggtttggaaaagttaaatgcgttataattataattaatgtaaatacgttagatttgaaatttttttaaaagaaaatatttttaattttaaaagtatgttatattgtttaaatttggtgcgatttttttattttttttttattttttatattttgagggggtaaattgtgaaaattattttttttaaaattataatataattaaatttttttatacggaatggatagattatttaatttaaaaatattggttatttaatttttgtaaaataaaaatatgaatttagatttttatttaagatttaagtaggagagtttttttttgtttattagaattggatatattaaaatttttattaataattaatgatagttggagtggggagaaataggtatttttatataatattaatggataagtaaatattatttacgatataatattttatttgtagaaataacggaagtattagtaattttaaaatttagacgttgatgtagtttgggaaaagatattgtagaaaagaagaaaataattttgaaattgtatttgtatagtttttatatatatttgtttttttttaattgtttattatcgaagaagggagggtgatgtgagtggaggttgattaaatggttaaatttttttttaagttttgtaagttattgtttagtttttaatgattttatattaaaataggtgcgtagaggtttattaatgttgatttttatcgtaataaaattttagaaattgtgtaatgttttttatagagaatagataggttaattaaataaacgtatatataaataataatatgtaatatggttgatggaaaaaatgatgtattaggttgaattatataaaattgttaatattgaattgttttgatttataaaaatattgtaatttttaatagtttattgatatatatttatataaaataatatgggaagttgattttgattacgggagttaatcgaaaaataaaatgtaggttgggtatagtggtttacgtttgtatttttagtattttgggaggtcgaggtgggtagattacgaggttaggagatcgagattattttggttaatatggtgaaatttatttttataaaaaatagaaaaattagttgggcgtgatggtatatgtttgtaattttagttattcgggaggttgaggtaggagaattgtttgaacgtgggaggcgg

SEQ ID NO: 115 - DNA, 18463 bp, Artificial Sequence
  chemically treated genomic DNA (Homo sapiens)
tttgagtaggcgtgtatttcgtagataggtttagcgttttttgtttgttaggcgtcgagttggatggtaggaatatattttatcgggtaagatttggtgtttagttttttaaggtattagttattgggttgaaagagagaaataagttaaaaaacggaaaaattagttagaagtttagtatatgttttaaggaagttagtaggttgtagtgtgagagaattagtaaaagcgtatttgatttagataggggtgttggaagtagttttttaaaagtggcgttgtttttgaaacgtagtttaggatttgtatttatgtgtaggaagttttatagtacgagaggtttatatagggataaggcgttaagggggattgaggggtacgaggggattgagattatttttggtttgtatcgttgttgtggttcgggttttggtgatttaggagtagggagaatagagagtttcgtttatatttgagatattagagggagagatgttgtattagttcgtgtttatgttgttgataaagatatatttgagattgggtaatttattaaagaaagaggtttaatggatttaaatagttttatttgtgggggaaggttttataattatggtagaaggtaggaggagtaagttaagttttatatggatggtagtaggtaaagagagagggagtttgtgtagggaaatttttttttataaaattgttagattttgtgagatttatttattattacgagaacggtatggaaaagatttgtttttatgatttaattattttttattaggttttttttatagtacgtgggaatttaagatgagatgtgggtggggacgtagttaaatcgtattagatttttaaaggttagatttagtaggtgttgttatagtaaagagaattgtcgggtatagtggtttgatatgggcgggagttttggtttgagttttggatacggaagggatttagaggaggtttcggttgttcgttggtgttgaaggttgagatttggaaaggtgatggggggtgtaggtaaggtagaaaggaaatttttaggtttaggtagaagtattatgttgtttatatttttttgggaagtggtattcgcgggggtggttagtaagattttttggttatgggatttttaagatgtatttttttatgttgtttttttagatattttggttattttgttgatcgacgtatttttgttgttataagaaaaagattagaaatacgtttttgtttttgtggtatgtattttgtttttttagacgaagggtcggttgggtgttgtggtttacgtttataattttagtattttgggaggtcgaggtgggtagattatttgaggttaagagttgaagtttagtttggttaatatggtgaaattttatttttattaaaaatataaaaattagtcgggtatggtggtttatgtttgtagttttagttatttaggaggttgaggtaggataattatttgaatttaggaggtgaaggttgtagtgagttgagattgtgttattgttttttagtaagattgcgttattgttttttcgtttgggtaatagagcgagattttattttaaaataaaaaaataaaataaataaataaaaaatagacgaagggttttgtttgttgtgattttgttgggaggttggttgaaattgtttatggaaggggtatttgtgagttttttaggtttatatagttgggattataggcgttcgttattacgtttggttaattttttgtatttttagtagagacggggttttattatgttggttaggttggtttttattttttaattttaagtgattttttcgttttggttttttaaagtgatgggattatagtcgtgcgttatcgtgtttagttgttggtgtgtttttaattagtgtatttgtttgttgaggttgttgtaaataaagtattatggattgggtggtttagattatataaatttattgttttatgtttttgtaggttgaaagtttaagatgaaggtattagtagggttggttttttttgaggttttttggtttgtaggtagttatgtgtttatttgttttttgtgttttcgagtggttatttttttgtgtgtgtttttgtgttaatttttttttgttagaaggatgttagttagattggatttgggttcgtttatatgattttattttgttataattatttttttttttttttttttttttttttttttttgagatagttttattttgtcgtttaggttggagtgtgtaatgatataatttcgatttattgtaatttttatttttcgagtttaagtgatttttttgttttagttttttgagtagttgggattataggtatttgtcgttatattcggttattttttgtatttttagtagagatggggttttattatgttggttaggttggttttgaatttttgattttaagtgatttgtttgttttagttttttaaagtgttgggattataggagtgagttattatattcgtatattaattatttttttaaaggttttatttttaaagatagttatattttgaggtgttagggtttaggattttatatgaatttgtggggaatatagtgtagtttattttagttagttaaaatgtgtattttgttggtttgtggaagtattgttttttgaaggatgcgtgatagattagaaatatcggtggttttgggtggtttgaggtataagatagagatgggtttatttgttgttatatattatatatcgttgtattttttgagttttttcgtgtgtatgtgtattgtcgattatttaaaaaaaaatttttaagttgatgaaattgatatattatcgggatattaaggggtaagatggtttatttttgttattttagtattttgggaggtcgagataggaggattatttgagtttaggattttaagattagtttgggtaatatagtgagattttatttttataaaaaatataaaaattagttgggtttggcggtacgtgtttataattttagttatttaggaggttgaggtgggaggattatttgagtttaggaggttaaggttgtagggaataatgattgtattattgtattatagtttgggtgatagagtaagatttggtttttaagatagtttaaaaaaaaaaaaaaaaaaaaaaaggtttttaggattttattgtaatagtatttttttttttttagatggtaaaatattttcgttttgaattgtttgaaaagaaatgaggagcgtgatttttatttttagttttttttattaggtttttgatttttttgttgtttgggtgttgtggggtaaagggtgatttttttaatgttttttatttatgtaggatttaaagttattcgttatttcgttataaaagtttatcgtgagggaagtggttaacgaggagaaagcgatgtttttgattagcgtttttttgtaagggtcggagatgtatgaaatttatacgagttttaaagaggataggaacgtttggatggtttatatttaaagggttgtggagaggtgaggagggtttgggggtttttttatttattgtgtttttttcgttgattggtttatttttggtttcgatcgttggttattagttgtgattttgaatttttttattttagtttgggatttatgacgttattttagttttttttgatgatttaatttgttggacgttgaggttaacgggtttagaaaggtagttgtaatttgggtttttttgtatgcgtgggttattgtatttgttatggcgggttttttgtattttagggttagatttgttggagtagggtatggtattttgttttttttttttgggtcgagtattttttagggtttagaattagttggttttttttttttttttttattttttatttttttgagatagagttttgttttgttatttaggttggagtgtagtgatgtaatttcggtttattgtagttttcgttttttaggtttaaacgattttgttgttttagttttttcgagtagttgggattataggcgtgagttattgcgtttagtttattttgttttgttttgttttgttttttagagtttggtttttgttttattatttaggttggagtgcgttggtataattatagtttattgtaatttaaatttttgggtttaagttattttattttttcggttttttaagtagtttgaattataggtatatattattatatttagttagattttttatttttgtagagatggggttttattgtgttgtttaggttggttttgaatttttggttttaagttatttttttgttttggttttttaaagtgttgggattataggcgtgagttattatgtttgtttatttttttttttgattttcggaggttttttggtgttttaatttggtttagatttttttatttatagtagttgtagttttacggggtttgtagttatttatttgtatttggtaggttttttgtaagttcgttgttttttggattttttttttaagttataggtaggtatgtaaagtttttttttggttatgttttggcgttttggggcgggatgaatgttagtggtttttttttttttttttttcgtttttttgtattacgaataagttaaattatttttaaagttagagacggtcgtggcggttggttttgtagaattagcgtttgtgtcgaggttggtttgtttgggaagtatagttatttattcgatttttttttttgtagttgttttgacgaggaggaggggttttttagtttgttcgaagaggaaaggaaggtggtcgaggttcgcgttacgagatttcgggatttttaaggtgagcgggagatagcgtttgggtatattttttgtgtggtgagttttgggttttttattaggattggttatagagggtgaattgttttttaggtgattcggtgttttttcgtgggttgtgttatgttttgtagttttgtgaagtattagaacgggttgtgttatgatatagcgatttttagaggttatttagttttttgggggtatgtgggagagggagggaggagagtttagaggatttgagttttttttagagtcgattatatagttatatacgttattattattttattttcgtgtagttaggagtttaatagggtattttagttttatacgaaggaatagtatagggtttttatagtttttttttagagtttttttttttttgtttaattatacgattgagatgtaatttatatattatagtatttatttttttaagcgtggggtttaggggtattttagtgtatttttaattatgtagttagaattatgttaattttagaatattttattattttagaaagaagtttcgttttttttaatagttattttttattttatgttttaattttggtaataggaatttattttttgtttttgtagattggtttgttttggatattttatataaatggagttatatcgcgcggttttttgggtttggtttttttcgaggtgtggtattaaggttcgttcgcgtttagtgagtattttgttaagaataatttttggtgttttgtagtttgcggtaagtttttttttttttttttattgtttgtatttttttttattttatttttttttttttttttaaatagagtttcgttttgttattaggttggaatgtagtggcgtgatttcggtttattgtaagttttgtttattaggtttaagagattttttttttttagtttttcgagtagttgggattataggtattcgttattacgttttattaatttttgtgtttttagtagagatggggttttattatgttggttaggatggttttaatttttcgatttcgtgatttgtttgtttcggttttttaaagtgttgggattataggcgtgagttatcgttttcggttttgtattatttatttttaaattggataatatttaaataataagtggtttggtatggtggtttatgtttgtaatttttgtattttgggaggttgaggtagatggattattggaagttaggagtttgagattagtttggataatatggtaaaattttgtttttataaaaaatttaaaaattaggttgggtgcggtggtttacgtttgtaattttagtattttgggaggttaaagtaggtggattatttgagattaggagtttgagattagtttggttaagatggtaaaatttcgtttttattaaaaatataaaaaattagttaggtatggtggtgcgtgtttatagttttagttattcgggaggttgaggtaggagaatcgtttgaattcgggaggtggaggttgtagtgagtcgagattgtgttattgtattttagtttgggcgatagagcgagatttttttttaaaagaagaaggaaggaaagaaagaaagggaggatggaaaatttagttttttaaggttttaagttggttttagattaataaatgggtttgatataatttttatttatattttattgtgtttgattttattttattttttttagagataggattttgttttgttggttaggttggagtatagtattgtagttatagtttattgtagttttgaatttttgggtttaagcgatttttttgttttattttttaggtatgtattattataattagttaattttttatttgtagagatagagttttattatgttgtttaggttggtttcgaattttaggtcgtaagagtttttttattttggtttttttaagtattgggatcgtaggtttgagttattatagttaatttgatttttataataagggggaaaataattagaggataaggttatgtttttttttattttttaggaatgtaggatataagggggtagtttattttagggtagggttagcggggttttttatttttaggttagttttcggggtttagatgattttagggaaggtcgattcggttgattgttatttttattattattttgtagagcggttgagtatgaaagattagttgatcgtatagagttttttagagaaatagtagatttatttggagatggtcgagatgggcggtttcgaagatttgttttagtttcgaggtttatttcgtggaggggatttattcgagattttgtagggggagttaatttttaagtcggttatgagcgagagtaagttggttgtttatattttaagggtgtagttttgtcggggtgggttttttagggaattttaggttaggtttacggtttattgtggtcgatacggtattttgtttaggataggtttttatgtggggggggtttaggagtagtattgatcgtttttcggtgtttgtgagagttagaagggttttagatataatttgggttaagtcgttttttgtagatataaagtatttttttttcgtttaataatcgttttgatgttttttgtatgtagaggttttaagtcgggtcgtggggaggatttgaagttgattaagattggttttttatttattagaggttttttttttttttgggaggtgggttttggtgatatttttagaaaaatatacgtatatttttttagtgggtttttacgtatagttttaatatagtcgttaggtttttgggttggtcgtttgagtaggtagttagcgtttagtttgttttttttttttttttttttttttttttttttttttttgagatggagtttcgttttgttatttaggttggagtgtagtggcgtgatttcggtttattgtaatttttattttttgggtttaagtaattttgttttagttttttgggtagttgggattataggtatttattattacgtttagttaatttttgtatttttcgtagagatggggttttattatgttggttaggttggtttcgaatttttgattttagatgatttatttttttttgttttttaaggtgttgggattataggcgtgagttatcgcgttttgttttaatttgtttttttaatagtgagggaagtcgatttagtttttgttttttagagttttttcgtagaataagacggtagagacgggggttagtttttttttttttaggtttattgatatttttttattcggttttagtggttattgtttttggttttttggggatatttttatatttcgtattttggtttggaatgtttttgtttttatttttgtgtttggttatagtttgttggttttagagggttttttgtagatagtttttttttataaagttatttttttatatggttattgttatataattagtgtatggttattgttatataatatattaagtgttttttgttggttttgggtagggttatatttagtattcgttagtttttggtttagggcggtttggtggaaggagttgtaggagtttgtattcgttttttttatggttgttttatagttttgtttttttatttagacgtagattggtttgttttggtggttatatttgaagtaagggtgtgcgtagggatagtggggttgaaattttacggtatatagaagggggtaggcgattattattttagtgagttttttcgtttattcgggtttcgttgttttagcgtttcgtatttttttagtatattttcgtagggcgattcgtgttttttgtttttttttttttatagtcgagggtatttagagtttgatttgtaggtagttgggtagcgttaacggttaggcggaagacggaggtagttttataggttcgtttaggagggttgagattttcgcgggttacgattgtataaatagttttattaagagtaagagcggggtcgtttttttttttgtttttagggtcgttttttaggatgtatattaatttgtatggggttttttagaatttttttttttgttgttgttgagatagagttttgttttgttatttaggttggagtgtagtggcgtaattttagttttttgtaatttttgttttttgggtttaagtgattttttcgttttagtttattaagtagttgggattataagtatacgttattatgttcggttattttttgtatttttagtagaaatggggttttattatgttggttaggttggtttcgaatttttgattttaggtgattcgttcgttttagttttttaaagtgttgagattgtaggtgtgagttatcgtatttagtcgattttttggaattttttgaaattttttagatatcgttggttgtgttgtgatagtagtatttagattagtttgtttttttttagtaggcgtttgtgttgtagacgttattattcgggtttagtttgggttttttatttgggtaggggttgggggtggattgggaagtttttttttttttacgggatggtagtatttttatgtttttggtttggggtttttagatggtagttttaagaagaaagttagtagtattgattttaggtttcgagattggcgaggttttttaaatagttcggatttgaagtttagtgatagtgatatttttgggagttttgaggaatcgtcgtaggtggtacgtggatatttatttgttcggtatagtttgagtcgttataaggatttatgtgtgtgagtagtttttgttggggttgtttagttttagttttattagtatcgataagtattgtttgttttgtggtgaataatagtattttagtttagattaatgtattggtaggtgatttttttttgtagttttttgggaaaagtaaagaggtttttaagaggaaggttggggaggggataggtttagggtatttattatggttttattaataggcgaggaattttttatagggattattagtttttagtcggggtaggtgtggtggtgtttattagatgttagatgttttcggttatttttttgtttttgaattagaaggttaggtgtttattcggttttgtttaggttagggggttagaggttaaggttagttgtttttgattagttttgaggtttggatttgtttttgtggttagagttggtacgtaggttttatagttaagtttattttattttttaggaggttttagtttttcgttttttaaatatttagatttgtataagttagttgattagtagggtttgtgtttttagttatgattcggttttgggttttttttgttatttatattaagggatgtatttttaataataagtaggggtcgggtgtagtgttttatatttataattttagtgttttgggagatcgaggtgggaggattattttttttttttttttttggagataaggttttattttgttatttaggtttgagggtagtggcgtgattatagtttatatagtttttaatttttaggtttaagtaatttttttattttagttttttaagtagttgaaattataggtgcgcgtttttatatttgattaattttttaaatgtttggtagatatagggttttattatgttgtttaggttggtttttaatttttgggtttaagtaatttttttgtttgggttttttaaagtgttgggattataggtaaggtcgttatatttggttttgggaggattatttgaggttatgagtttgagattagtttgggtaatatagtaagattatatgtcgataaaatatttttaaaatagttgattttttggttgggtgcggtggtttatgtttgtaattttagtattttaggaggtcgattcgggtgattatttgagtttagggtttgagattagtttggttaatatggtgaaattttgtttttattaaaaatataaaaattagttggacgtggtggtggatatttgtaattttagttatttaggaggttaaggtgggagaatcgtttgaatttaggaggtggaggttgtagtgagtcgagattgtattattgtattttagtttgggcgattaagtaagattttgttttaaaaaagttaaaaatagttgttgggtgtggtggtttacgtttgtaattttagtattttgggaagttaaggtaggtggattatttgaggttaggaattcgagattagtttgattaatatggtgaaatttcgtttttattaaatatataaaattagttaggcgtggtggtatattcgagtaattttagttatttgggaggttgaggtaggagaattatttgaattaggaaggtggtggttttagtgagttgagatcgtgttattgtattttagtttgggtaacgagtaaaattttattttaaaaaaaaaaaaaaaaaaaattaaaaatagttgattttggtggtgtatatttgtagttttagttatttaggaggtcgaggtgggaggattaggttattatattttagagtaaggttttgttttaaaaaaaaaaaaaagaagttaggtatggtggtttatgtttgtaattttagtattttgggaggtcgaggcgggcggattatttgaggttaggagtttgtaattagtttggttaatatggtgaaatttcgtttttattaaaaatatataaaattagttaggcgtggaggtttgagtttataattttaattattcgggaggttgaggtaggagaattgtttgaattcgggagttggagggtgtagtgagttaagatcgcgttattgtattttagtttgggtaataagagtagaatttcgttttaaaaaaaaaaaaaaaaaaaaaagttaaaaaaaaagaagaagaagaagaaggtttgagtttagtcggatgggttttgagttattttttttggtttgacggtgttttttttttaggtggaggcgttaggtacggaattcgattttcgtttgtttatcgttttggagtcggaggtaggcgttcgcgggtttttatttttttagggttttgtgtacgcgcgtgtggttttagttcgataattagtattaatttttttttttttttcgtagtttgtttagcggatttagatattgttttagttgtttttgaatttttaggtataggggcggggtggggtcggttacgcgtgtttttttttggttggttggggcgtaggtgcggtttttattcgtttggttttggtttttcgtaggcggtaatcgtttattaggatagttatgtggagacgtagcgggttgttatttaggagcgggagaagtagtttcggttgtagtcgacgcgtgggaatttgttgttggagtaggagcggtaacgtaatttcgagaagtagcgggaggagcgcgcggttttggagaagttgtagagttagttgcggtacgagtagtagcgttgggagcgcgagcgttagtggtagtattaggagttggagcgtgcgggcgcgcggttgtaggagcgcgagggcgaggcgcggtagttacgcgagcggttggagtaggagcgggtcgagttggagcgttagcgttaggtttattagtacgatttggagcggttgcgcgaggtttagcgtgtcgtggagcgcgagcgggagcgtttggagttgttgcgtcgttttaagaagtagaatatcgcgttaggcgcgttgtcgttcgatatattggtcgaggtgagcgcgtagtagttagtgtgcgtaggttgggggtgatcggtttgtacgtgtatttgtacgagtgtatgtaggtgatagggttcgcgggtgtatgcgtgtaggagtgtaagagtaaacggtataagatatttttgtattaatagtttatgtcgtagtatagatttttttcggagttggttaaatgtttaatagaacgttgttgtttaaaatatgttataaatgttagaaattttttaaaaaaaaaatgtatttttgtaattttagtattttgggtggtggaggtaggcggattgtttgagggtaggagttttaggttagtttgggtaatatggcgaaattttatttttataaaaaaatataaaaatgagttaggtatggtggtatgtatttgtggttttcgttatttggaatgttgaggtgggaggattatttgagttcgggagaatgaggttgttatgagtcgtgattacgttattgtattttagtttgggtaatagagtgagatatgagtcgtgattatgttattgtattttagtttgggtaatagagtgagatttcgttttaaaaaaaaaaaaaaaatgaagttgggtgttatggtgtgtattttagttattcgggaggttgaggtcggaggattgtttgaggttaggtatttgagattagtttgggttacgtagtgagattttatttttaaaaaaaaaatgtaaaaattagtagggcgtggtggtatatatttgtaatttaaattatttgggaggttgaggtagggggattatttgagtttaagaggtttaagagttatgattgtgttattgtattttagtttgggtgatagagtaagatcgtgtttttgaaaataaatttataaattatgggttttgtgaatagatgtggatacggatgtgtgagatgtttgtatatgagtgtgtgatagtatgggtgttattgagtgttattataagtttgtatatttagtaggggttggggacgggtaatgattagtagtttttttaggttgtatttggttttgtttagaataggagaggtcgagggttttttgtgtacgattttcgggggttttttagaggtcgtatagtaggaattttatattggatgtatttgttgttgtttttttaggtttagtttttaagttatttttttagttttaacggggaagggttggagggttttcgtgtgagtatgttgttattcggcgtggggttagagtacgtagagcgtttcgaggtggttcgtcgggatagcgtttttatcgagaatcggttggttaagagcgatgtgtttatttagttgtttagcgttattaattagttttagaggtaggcggtcgtgtagtagtagatttttattaagttggcggtttttattaagggtggtaaggataagggcggtaagagtaggggtttttagcgttgggagagtttaggtgagtcggttttattttttcgtttgggtttggaaggtgtaattggttaggttttagcggttcgttgggagttaggaaattcgggatatttgtgttattttttggagaggaaaattagaaggtatagttggtatcgtggttgaggttattttatatagggtcgtgtttggtttttaggtttaaaattgagatgatttattttgtattttttttattttaatttttaaaatagtgggatggggattaggagttttagaaagggatacgggtaagaaggtagagatttttggttacgtgggattagtatagtcgggatagggataggtgtaggcgtttttgtttattgttttagttttatagagtcgttttatagagtgggatacggagtttagagtagttttagtgtttttacggaggatgtttaggagtttttttgggggatatttttttgggggataattagggatgttttgggatgttttttgaagattaagggtgtgtttcgtggttattagggtttgtgttatttttataggaggtttagttttttttttagatgtcgggtgattttgtaggttttttcgtagggaggttggggtcgttttttttgaatttggggtttagtatttgagtagtttaggttacgggatttaggtcgttcgtgggaagtgttaggtgggggtggttaggtttttttgttttcggaggttgttttggcgggtggggatagttggttagtttggagttggtttaaatatttttttttttttagcgtttttcgatttgaagtagtagttgttgtttaataagtttatggggaaagatgagagtattttacggaatcgtcgttcgttgagttttattttgttcggtagatatagttttgcgtttttattaggtgagtttttattttttgatatgagtttagttttagggtagcggggttgcggtattattcggcgattgtttagtttgaattttttttttgttttagattttggttttttcgtttcgagtttatcgttagttgatagttttttcgagggttttttttttaaggtcgggggtatagtttttttgttcgggtttttagttttttcgttattgtcggttatattatttagcgttaaggaggacgttagtaaagaagacgttatttttttttaaaagggtcgtgatttaaggtgtaaggtttttttttgttttgtttattttttttgttttttggggatttttatggggttattatgtttatttagttgttttttttttttttttagtaaattattgatgatcgtttggtaggggttagtttgtcggtgttttgggttttgtagttgtttttgtagggttagcggtggtgtcggggttattttttgaattttttttttttttttttaaaaaggaaagtttttaatggaaagttgagttagaattaaattagggagttgtttgaaattatagtattttattcgggtggcggggagattaatttcgagttgttttttcgaggtagtgaggaacggtgtcggttttgtacggagttgaggataggatagattttgttttgagaaggagttgtcggtcggggttacgttttatagtcgtcgcgcgatagtggagttaagggttagggtattaggaggggttaggtggcgtcggtagtatttgtttttagaattaggtagaatttattttttaaatagagttttacgtaggtttattatgaattttagggttagggaatgagttaggtacgggggtatgggtagagagggttacggggtagggtttattgagggaatattagtggttttttagttaggttttgtgggtttggaagtttatcgtgaaaggggttgatttttgtttttttttatttggtattggttttgaaattagttgttttttaaattttgttttttaagggtaatcgttgttgtttatacgtttagtttgtttgggggagcgggtttttagttttagttagggcgggtatatattttgggtatagggtttttagttttcgggaaatgagtttttagggttggcgttttattttttaggtgggggttggtatattatagattgtcgagagcgttatgttttagggtatgtagaggatgtatttagagacgttgtagtaagtggataagtggtcgttgtgcgggtttttcgtttgtagtgagttgttgtagtttacggttcgttttttggaggggtggaggaaggaggtgttgggtagtattaaaggtgttgggatattttagggtggtgagatttatttacgatttagtttcggtggagaaagggtttatgttaagttttgttttgtattttaagtattggtggtaggattgggttttggttgatcgtttttgtttttagtggggtatatgtgagtttttgttagggttaagtttttttttcgaatttagggttttgggaattgtagatttcggggggatttagttttttttttattgtgttggtagaggtatttttgtgacgttgaatatagtgaatagggatattttcgttattcggggatagatgggtataagggaggggaaattttattaggaagtgtttttttgggtagaggcgtttattgggtgttgtgggtttaggagggggcggggtaggagttggtgttaatcgggaattagagttttatagttatatagtttattggtgataaggttttgagaatatagtggttaggtgtttttaggtttttggttttttcgacgattttaattttgtttagttcggtttttggttattagcgacgttgttcgtttttcgttagattttatgtgtgttatgtttattattagtgttttgtatttttgtattgagtatcggagtattttatagaagttgattgtatatttttgttttgttgtgaagagaatatttttagattttggtatttttttgagtcggcgtgtgtcggtttagtttttcgagatgttataattttttggatgggggagaagtttaaggaatttttgttcggttacgcggtgggaatttcgcgttttcgttatgtggtagaggggttttagtcgtgttaggtatcgggcggtagcgtcgatagtttttttttcgttagtgtttttcggttatttttgggttggagttcgattttatttgtaaagttgatagtcgagtaaatgtttttattttcgtgggatttgtatacgtttttgttagttgtggttatgattttagttatttgttaattatttttataatgattataatatttttttattgcgggatatttttgattcgttttagaatttaagatttgattttagtaataaacgtgttcgagatgagcggtgattggcgtgtacgtttttggaggttttatttgaggatttttttttgtttaaacgttgttgtaggagtagtaggttttgttgggggttttttatggtttttgttttttagttcgtttatttgtttttcgtgttttgtttaacgttttgaagatttttttaggtttagtttttaggagttgttgggggttttgtttttgtttttgtttttgtttttttggtttgtttgtttttttgagatagagttttgttttgtcgtttaggttggagattagtggtaggtttttagtttattgtaatttttgtttttcgggtttaagtattttttttgttttagttttttgagtagttgggattataggtgtgtattattacgtttagttaatttttgtatttttttagtagatatggggtttcgttatgttggcgaggttggtttcgaatttttgattttaagtgatttgttcgttttagttttttaaagtgttgggattacgggtatagggtaggagtggggcgtggaggtgtttgtggagggttttgtttatcgggtatattttaggttttggtggcgtttttacgaaaatttttttgtttttaatttataataatcgtaaaggttggaatttttattttttttatttggggtgagaggtagtttggttatgagtatgaaattattatttttatttggtttgagtttcggtttagtgaggcgaggattttgttgttttaatagagggttttttattataaggggattaggtgtaaagtcgattattagtttattaggaagcgtaaaaagggaatttttaggtagtattgtttattaggaagatgatgtaggttacgtgtggaattttttatttttagtagttatattaaaaaagtaaaaggagggtcgggtatagtggtttatttttgtaattttagtattttggggaggcgggggttgaggtaggaggatagtttgagtttaggagtttaagattagtttgggtaatatagtgaaatttttttatagaaaaattaaaaaattagttaggttggtcgggcgtagtggtttacgcgtgtaattttagtattttgggaagttaaggtgggtagattacgaggttaggagatcgagatt

SEQ ID NO: 116 - DNA, 18463 bp, Artificial Sequence
  chemically treated genomic DNA (Homo sapiens)
ggtttcgattttttgatttcgtaatttgtttattttggttttttaaagtgttgggattatacgcgtgagttattgcgttcggttaatttggttaattttttaatttttttgtgaaggggttttattatgttgtttaggttggttttgaatttttgggtttaagttatttttttgttttagttttcgtttttttaaaatgttgggattatagggatgagttattgtgttcggttttttttttatttttttaatatggttattaaaaatgaaaaattttatacgtggtttgtattatttttttggtggatagtgttgtttgagagttttttttttgcgttttttagtgagttagtgatcgattttatatttagtttttttgtgatgggaaattttttgttgaaatagtagggttttcgttttattggatcgggatttagattaggtggaaatgatgattttatatttatggttaagttgttttttattttagatggaggaagtgaaagttttagtttttgcggttattgtggattaaaagtaaaaagattttcgtggaggcgttattaaagtttgaagtgtattcggtgggtaggattttttataggtatttttacgttttatttttgttttgtgttcgtaattttagtattttgggaggttgaggcgggtagattatttgaggttaggagttcgagattagtttcgttaatatggcgaaattttatgtttattaaaaaaatataaaaattagttgggcgtggtggtgtatatttgtaattttagttatttaggaggttgaggtaggagaagtgtttgaattcgggaggtagaggttgtagtgagttgagaatttgttattggtttttagtttgggcgatagagtaagattttgttttaaaaaaataaataaattaaaaaaatagaaataaaaataaaaataaaatttttaataatttttggggattggatttgaaggggtttttagagcgttaagtaggatacggagggtaggtgagcgagttgaggggtaggagttatggggagtttttaatagaatttgttatttttgtagtaacgtttgggtagaagaaaatttttaaataaaatttttaagaacgtgtacgttagttatcgtttatttcggatacgtttattgttagaattaggttttaagttttaaagcgggttagaaatatttcgtagtgaggaaatgttgtaattattgtaaaaataattagtaggtgattaagattatgattataattgataaagacgtgtgtagattttacgaaaataggaatatttgttcgattgttaattttataaataaaatcgggttttaatttaggagtggtcgaggggtattggcgagggaagggttgtcggcgttgtcgttcgatgtttagtacgattgagatttttttgttatatggcggggacgcggggtttttatcgcgtggtcgagtagaaattttttgaattttttttttatttaaggaattgtggtatttcggagggttggatcggtatacgtcggtttaggagggtgttagggtttgggaatgttttttttataatagaataggaatgtatagttagtttttgtaaagtgtttcgatatttagtataaaaatataaaatattgatgataaatatggtatatatgggatttgacggggggcggatagcgtcgttgatggttagggatcgggttgggtagagttgaggtcgtcggaggggttaggagtttggggatatttggttattgtgtttttaggattttgttattaatgggttgtatggttgtggggttttggttttcggttggtattagtttttgtttcgtttttttttgagtttatagtatttagtgggcgtttttgtttaggggagtattttttgatggagtttttttttttttgtgtttatttgttttcgagtggcgggaatgtttttgtttattgtatttagcgttataggagtgtttttgttagtatagtgggagaagggttgaattttttcgggatttgtagtttttaggattttgggttcgggagaaggatttggttttggtaggggtttatatgtattttattgggaataaggacgattagttaggatttagttttattattaatgtttggggtgtagaataaggtttgatatgggttttttttttatcggagttggatcgtggatggattttattattttgggatgttttagtatttttgatgttgtttaatattttttttttttatttttttagggaacggatcgtaagttgtaatagtttattataagcgaggggttcgtatagcggttatttgtttatttgttgtaacgtttttaggtgtattttttgtatgttttgggatatggcgttttcgatagtttgtgatgtgttagtttttatttggaaggtgggacgttagttttgggagtttatttttcgggggttgaggattttgtgtttagggtgtgtattcgttttggttgaagttagaggttcgtttttttagataggttgagcgtgtgaatagtaacggttgtttttgggaagtagagtttgggaaatagttggttttaaaattaatgttaagtaaaaaggggtaaaggttagttttttttacgatgggtttttaaatttatagaatttgattggagggttattgatgtttttttagtgggttttgtttcgtggttttttttgtttatgttttcgtgtttggtttattttttgattttgaggtttatggtgaatttgcgtggggttttgtttgggaagtggattttgtttgattttggggatagatgttgtcgacgttatttggttttttttggtgttttaatttttggttttattgtcgcgcggcggttgtggagcgtggtttcggtcggtagtttttttttaaagtaaggtttgttttgtttttagtttcgtgtagagtcggtatcgttttttattgtttcggaaaaatagttcggagttgattttttcgttattcggatggggtgttatgattttagatagttttttggtttagttttggtttaattttttattaaaaatttttttttttgaaaaaaaaaaaaagagatttagaaagtgatttcggtattatcgttaattttatagaaatagttgtaaggtttagagtatcgataggttggtttttgttaggcggttattagtggtttgttagggaagaggaggggatagttgggtgggtatggtgattttatgggggtttttagagagtaggaagggtgggtagggtagggaggggttttgtattttgagttacggtttttttagaagaagatgacgttttttttgttggcgttttttttggcgttgagtggtgtggtcggtagtggcgagggagttgggggttcgggtaggagggttgtgttttcggttttgagagagaagttttcggaggggttgttagttggcggtgggttcggggcggggaagttagggtttggaatagagagagggtttagattgagtagtcgtcgggtggtgtcgtagtttcgttgttttgggattgggtttatgttagggggtgggggtttatttggtgggggcgtaggattgtgtttgtcgggtaggatagggtttagcgagcggcggtttcgtgaggtgtttttatttttttttatgagtttgttgagtagtagttgttgttttaggtcgaaggacgttggaagagagaaggtatttgggttagttttaggttggttagttgtttttattcgttagggtagttttcgagagtagaggggtttggttatttttatttgatattttttacgggcggtttggatttcgtgatttgagttgtttagatgttaagttttagatttagggagaacggttttaatttttttgcggaaggatttgtagagttattcggtatttggagaggaggttgagttttttgtggaaatagtataggttttagtgattacgggatatatttttaatttttagagaatattttagaatatttttggttgttttttagggaggtgttttttagaggagtttttggatatttttcgtggaaatattggggttgttttgggtttcgtgttttattttgtggaacggttttgtggaattgggataatgagtagaggcgtttgtatttgtttttgtttcggttgtgttgattttacgtggttagggatttttgtttttttgttcgtgtttttttttaaggtttttggtttttattttattgttttgagggttgaggtggagaagatgtagggtggattattttagttttgggtttggagattaaatacggttttgtgtggggtggttttagttacgatgttagttgtgttttttggtttttttttttagaggatggtataggtgtttcgaattttttggtttttagcgagtcgttagagtttgattagttgtattttttaggtttaggcgaaggggtggggtcggtttatttgagtttttttagcgttgagagtttttgtttttgtcgtttttgtttttgttatttttggtggaggtcgttagtttggtggggatttgttgttgtacggtcgtttgtttttggaattggttggtggcgttgagtagttggatgggtatatcgtttttggttagtcggttttcggtgggggcgttgtttcggcgagttatttcggggcgttttgcgtattttggttttacgtcggatggtagtatgtttatacgagggttttttagttttttttcgttgaagttgggagggtggtttgggggttgggtttgaggggataatagtagatatatttaatgtgaggtttttgttgtgcggtttttggagagttttcgagggtcgtgtataggagattttcgattttttttgttttggatagagttaggtgtagtttgaaggagttgttggttattgttcgtttttaatttttgttaaatgtgtagatttgtggtgatatttagtggtatttatattgttatatatttatatataaatattttatatattcgtgtttatatttgtttatagaatttatggtttatagatttgtttttagagatacggttttgttttgttatttaggttagaatgtagtggtataattatagtttttgagttttttgggtttaaatgatttttttgttttagttttttaagtagtttggattataggtatgtgttattacgttttgttaatttttgtattttttttttagagatgaggttttattacgtggtttaggttggttttaaatatttagttttaagtaatttttcggttttagtttttcgagtagttagggtgtatattatggtatttagttttattttttttttttttttgagacggggttttattttgttgtttaggttggagtgtagtggtatgattacggtttatgttttattttgttgtttaggttggagtgtagtggcgtgattacggtttatggtagttttattttttcgggtttaagtgatttttttattttagtattttaagtagcggggattataggtgtatgttattatgtttagtttatttttgtatttttttgtagagatggagtttcgttatgttatttaggttggtttggaatttttgtttttaagtaattcgtttgtttttattatttaaagtgttgggattataggagtgtattttttttttaagaagtttttaatatttatggtatgttttgagtaatagcgttttgttaagtatttagttagtttcgagaaaggtttgtattgcggtatgagttgttaatgtaagggtattttgtgtcgtttgtttttatatttttgtacgtatgtattcgcgaattttgttatttgtatgtattcgtgtaaatgtacgtgtaaatcggttatttttaatttgcgtatattggttgttgcgcgtttatttcggttagtgtgtcgggcggtagcgcgtttggcgcggtgttttgttttttgaggcggcgtagtagttttaggcgttttcgttcgcgttttacggtacgttgggtttcgcgtagtcgttttaggtcgtgttggtaggtttggcgttggcgttttagttcggttcgtttttgttttagtcgttcgcgtagttgtcgcgtttcgttttcgcgtttttgtagtcgcgcgttcgtacgttttagtttttggtgttgttattggcgttcgcgtttttagcgttgttgttcgtgtcgtagttggttttgtagtttttttagggtcgcgcgtttttttcgttgtttttcgaagttgcgttgtcgtttttgttttagtagtaggtttttacgcgtcgattgtagtcggaattgtttttttcgtttttggatggtagttcgttgcgtttttatatagttgttttggtgggcgattatcgtttgcggagggttagggttaggcgagtgagagtcgtatttgcgttttagttaattaggaaagggtacgcgtggtcggttttatttcgtttttgtatttgaaggtttaggagtagttgggatagtgtttggattcgttggataagttgcggagaggagagggagattgatgttagttatcgggttgaggttatacgcgcgtgtataaggttttggggagatggagattcgcgggcgtttattttcgattttaggacggtgggtagacggggatcggatttcgtgtttggcgtttttatttgggaagaggatatcgttaaattagagagagtggtttaagatttattcgattagatttaagttttttttttttttttttttttttttaatttttttttttttttttttttttgagacggaattttgtttttgttgtttaagttggagtgtagtggcgcgattttggtttattgtattttttagttttcgggtttaagtaatttttttgttttaatttttcgagtaattgggattataggtttaagtttttacgtttggttaattttgtgtatttttagtagaaacggagttttattatgttggttaggttggttgtaaatttttgattttaggtgattcgttcgtttcggttttttaaagtgttgggattataggtatgagttattatgtttggttttttttttttttttttgagatagggttttgttttagagtgtagtggtttgatttttttatttcggttttttgagtagttgggattataggtgtgtattattaggattagttatttttaattttttttttttttttttttgagatggagttttgttcgttgtttaggttggagtgtaatggtacgattttagtttattgaaattattatttttttggtttaagtgatttttttgttttagttttttaaatagttgggattattcgaatgtgttattacgtttggttaattttgtatatttggtagaggcggggttttattatgttggttaggttggtttcgaatttttgattttaggtgatttatttgttttggttttttaaagtgttgggattataggcgtgagttattatatttagtagttatttttaatttttttgaaataaagttttgtttggtcgtttaggttagagtgtagtggtgtaatttcggtttattgtaatttttattttttaggtttaagcgatttttttattttagttttttgagtagttgggattataggtatttattattacgtttagttaatttttatatttttagtagagatagggttttattatgttggttaggttggttttaaattttggatttaagtgattattcgagtcggttttttgaagtgttgggattataggtatgagttatcgtatttagttaaaggattagttattttaaaaatattttgtcgatatgtggttttgttatgttgtttaggttggttttaaatttatggttttaagtgatttttttaaggttaggtatggcggttttgtttataattttaatattttgggaggtttaggtaggaggattgtttgagtttaggagttggaaattagtttgggtaatatagtgagattttgtatttattaaatatttaaaaaattagttaggtgtgggggcgcgtatttgtagttttagttatttgggaggttgaggtgggaggattgtttgagtttaggagttagaggttgtgtgagttgtgattacgttattgtttttaagtttgggtgatagagtgagattttgtttttaaaaaaaaaaaaaaaaagtgatttttttatttcggttttttaaaatattgggattatgggtgtgaggtattgtattcggtttttgtttattattgaaaatatattttttagtgtggataataggaaggatttaggatcgggttatgattgggaatataggttttgttggttagttgatttgtataaatttgggtgtttggaaaacgaggggttggggttttttgggaggtagagtgggtttggttatgaggtttgcgtgttagttttggttataggggtaagtttaagttttagaattgattagaggtaattggttttggtttttgattttttgatttgggtagggtcgagtaggtatttggttttttgatttaaaggtaaaggaatagtcggggatatttggtatttggtaggtattattatatttgtttcggttgaaagttggtggtttttgtagggggtttttcgtttgttgatgaagttatggtgagtgttttgagtttgttttttttttagttttttttttggggatttttttgttttttttaggaggttgtaggaagaaattatttgttagtgtattaatttgggttgagatattgttatttattataaaataaataatgtttgtcgatgttaataagattaaaattggataattttagtagaagttgtttatatatatgaatttttatgacgatttagattgtatcgagtaaatggatatttacgtattatttgcggcgattttttagagtttttaggaatgttattgttattgagttttaagttcgggttgtttggggggtttcgttagtttcggggtttggggttagtgttgttgattttttttttgaaattgttatttgagaattttaagttaggggtatgaggatgttgttatttcgtggggagggggaagttttttagtttatttttagtttttgtttaggtaggaaatttaggttaggttcgaatggtggcgtttgtagtatagacgtttgttggagaggggtaggttggtttgggtgttgttgttataatataattaacgatgtttggagggttttagaaggttttagaaaatcggttgggtgcggtggtttatatttgtaattttagtattttgggaggttgaggcgggcggattatttgaagttaggagttcgagattagtttggttaatatggtgaaattttatttttattaaaaatataaaaagtagtcgggtatggtggcgtgtgtttatagttttagttatttggtaggttgaggcgggagaattatttgaatttaggaggtagaggttgtagagagttgagattgcgttattgtattttagtttgggtgatagagtaagattttgttttaataataataaaaaagaaagttttaggaaattttatataagttaatgtgtattttgaggggcggttttggaggtaggaggggagacggtttcgtttttatttttggtggggttgtttgtgtagtcgtagttcgcgaaggttttagtttttttgggcgggtttgtggagttgttttcgtttttcgtttggtcgttggcgttgtttagttgtttgtagattaggttttggatgttttcgattgtggaaggaaggggataggaggtacgggtcgttttgcggaagtgtgttgggggaatacggagcgttggggtagcgagattcgggtggacggagggatttattggggtggtgatcgtttgtttttttttgtgtgtcgtgggattttagttttattgtttttgcgtatatttttattttaggtatggttattaggataggttaatttgcgtttaagtgagaggatagggttgtggggtagttatggggagggcgggtataggtttttgtagttttttttattaggtcgttttgggttaggggttggcgaatgttggatgtggttttgtttagggttagtaggaaatatttggtgtgttatatgataatgattatatattgattgtgtgataatggttatatgggagagtgattttgtggggaagggttgtttatagaaagttttttaggattaataggttgtggttaggtatagaggtggggataagaatattttaggttaaggtgcgggatatgagagtgtttttagggggttaagaataatggttattggagtcgggtggaaggatgttagtgggtttggagggagaaagattgattttcgtttttgtcgttttattttgcggaaaggttttggaaggtaggggttgagtcggttttttttattgttgaaagagtagattgaggtagggcgcggtggtttacgtttataattttagtattttgggaggtagaggagggtggattatttgaggttaggagttcgagattagtttggttaatatggtgaaattttatttttacgaaaaatataaaaattagttgggcgtggtggtgggtgtttgtaattttagttatttaggaggttgaggtagaattatttaaatttaggaggtggaggttgtagtgagtcgagattacgttattgtattttagtttgggtgataaagcgagattttattttaaaaaaaaaaaaaaaaaagaaaagaaaaaaagaaagagtagattgggcgttgattgtttgtttaagcggttagtttaggggtttggcggttgtgttagagttgtgcgtggggatttattgagggagtgtgcgtgtgtttttttggggatattattaggatttattttttaggaagaagaggaatttttggtaggtagggaattagttttagttaattttagattttttttacggttcggtttagagtttttgtatgtagggagtattagagcggttgttgaacggggagaaagtgttttatgtttgtaaggagcggtttggtttagattatgtttaaggtttttttggtttttataggtatcggggggcggttagtgttgtttttgggttttttttatatagaagtttgttttggatagggtgtcgtgtcggttataatgagtcgtgagtttggtttggggttttttgaggagtttatttcggtaagattgtatttttgaggtgtgggtagttaatttattttcgtttatggtcgatttgagaattagttttttttgtagggtttcggatgggttttttttacggaataggtttcggggttggggtaggttttcgaggtcgtttatttcggttatttttaggtagatttgttgtttttttaggaggttttgtgcgattagttggttttttatgtttaatcgttttgtagagtgatggtggaggtggtagttagtcgggtcggttttttttggaattatttgagtttcggggattggtttaaggatgaggaatttcgttggttttgttttgaggtaggttgtttttttgtgttttgtatttttgggaggtaggggagggtatggttttgttttttgattatttttttttttgttataaaaattaggttagttgtggtggtttaggtttgcgattttagtatttagggaagttaaggtaggaggatttttgcggtttggagttcgagattagtttggataatataatgagattttgtttttataaataaaaaattagttggttgtggtggtgtatgtttgggaaatgaggtaggaggatcgtttgagtttaggagtttaaggttgtagtgagttatgattgtagtattgtattttagtttggttaataaagtaagattttgtttttaaaagaaataaaataaaattaaatatagtagggtgtgagtgaggattgtattaggtttatttattagtttgggattaatttagagttttagaaaattgaattttttattttttttttttttttttttttttttttttttttgagaaggagtttcgttttgtcgtttaggttggagtgtagtggtataatttcggtttattgtaatttttatttttcgggtttaagcgatttttttgttttagtttttcgagtagttgggattataggtacgtattattatgtttggttaattttttgtatttttagtagaaacggggttttgttattttggttaggttggttttaaatttttgattttaaatgatttatttgttttggttttttaaagtgttgggattataggcgtgagttatcgtatttagtttaatttttaaattttttgtagagatagggttttgttatgttgtttaggttggttttaaatttttggtttttagtgatttatttgttttagttttttaaagtgtagggattataggtatgagttattatattaggttatttattgtttgagtattatttaatttagaaatgaataatatagggtcgggagcggtggtttacgtttgtaattttagtattttgggaggtcgaggtaggtagattacgaggtcgagagattgagattattttggttaatatggtgaaattttatttttattaaaaatataaaaattagtggggcgtggtggcgggtgtttatagttttagttattcgggaggttgagggaggagaattttttggatttgataggtagagtttgtagtaagtcgagattacgttattgtattttagtttggtgatagagcgaggttttgtttaaaaaaaaaaaagaagataaaataaaaaaaaatatagatagtgaaagggaagaagggagtttgtcgtaggttatagggtattaggaattgtttttgataaagtgtttattgagcgcgggcgaattttaatattatatttcgagaggagttagatttaaaaggtcgcgcggtgtgattttatttatgtggaatgtttagggtaggttaatttatagggataggaagtagatttttgttgttagggttggggtatggggtggggagtgattgttaagggggacggggtttttttttggggtggtgggatgttttaaagttaatatgattttggttgtataattggaaatgtattgaaatgtttttgaattttacgtttgggagggtgagtgttgtggtgtgtgaattatattttaatcgtgtaattaaatagggaggaggaagttttggaaggaggttgtggggattttgtgttattttttcgtatgggattgggatgttttgttgagtttttggttgtacgaggatggggtggtggtggcgtgtgtggttgtgtggtcggttttggaaggggtttaggttttttgggttttttttttttttttttttatatatttttaaagggttaagtgatttttggagatcgttatgttatggtatagttcgttttaatgttttatagagttgtaggatatggtatagtttacgggaaaatatcgggttatttggggggtagtttattttttgtggttagttttgatggagggtttagggtttattatataaggggtgtgtttagacgttgtttttcgtttattttgaaagtttcggagtttcgtggcgcgggtttcgattatttttttttttttttcgggtaggttgaagggtttttttttttcgttagggtagttgtagggagaggagtcgggtgggtaattgtgttttttaggtaggttagtttcggtatagacgttggttttgtagaattagtcgttacgatcgtttttgattttgggagtgatttagtttgttcgtggtgtaggaggacgaggaggggaagagagagagttattgatatttatttcgttttaaagcgttagggtataattaggaagaggttttatatgtttgtttgtgatttagaggaggagtttaggggatagcgggtttgtagaggatttgttaggtgtaggtgggtggttgtaagtttcgtagagttatagttattgtggatgggggagtttgaattagattaaggtattaggaagttttcgggaattaagagagggagtggataggtatggtggtttacgtttgtaattttaatattttgggaggttaagataggaggatggtttgaggttaggagtttaagattagtttgggtaatatagtgaggttttatttttataaaaataaaaaatttagttgggtgtggtggtgtatgtttgtagtttaagttatttgggaggtcgagggggtaggatggtttgagtttaggagtttgggttgtaataagttatgattgtgttagcgtattttagtttgggtgatagagtaagagttagattttaaaaaataaaataaaataaaataaaataggttgggcgtagtggtttacgtttgtaattttagttattcggggaggttgaggtagtagaatcgtttgaatttgggaggcggaggttgtagtgagtcgagattgtattattgtattttagtttgggtgatagagtaagattttgttttaaaaaaataaaaaataaagagagggaggggaagttagttggttttgggttttgaggggtgttcggtttaaggaggaaggataagatgttatgttttgttttaataaatttggttttagaatgtagagagttcgttatggtaggtgtagtggtttacgtatgtagaaaggtttaggttatagttgtttttttgggttcgttggttttaacgtttaataggttgagttattagaaggagttggaatggcgttatgggttttaagttgggatgagggagtttaaggttatagttgatggttaacggtcgaagttaagggtggattaattagcggaaggaatatagtgggtggggagatttttaggttttttttatttttttatagttttttggatgtgggttatttaggcgtttttgttttttttggagttcgtgtagattttatatattttcggtttttgtaaggaggcgttgattagaaatatcgtttttttttcgttggttattttttttacgatgagtttttgtaacgagatgacgggtggttttgagttttgtatgagtagagggtattggggaggttattttttattttatagtatttaaatagtagggaggttaagggtttggtgaggggaattaagagtgggggttacgttttttatttttttttaaataatttaaagcggaaatattttgttatttgggggaaaaaagatattattgtagtgaaattttagaaatttttttttttttttttttttttttaaattattttggaggttaggttttgttttgttatttaggttgtagtgtagtggtgtaattattgttttttgtagttttgattttttgggtttaagtgatttttttattttagttttttgagtagttgggattataggtacgtgtcgttaggtttagttaatttttgtattttttgtagagatgggattttattatgttgtttaggttggttttgaagttttaggtttaagtgatttttttatttcggttttttaaagtgttgagatgataggagtgagttattttgttttttagtatttcgataatgtgttaattttattagtttaaaaatttttttttaaatagtcggtaatgtatatatatacgagaaagtttaaaagatataacggtatgtagtatataataatagataaatttatttttgttttgtgttttaggttatttagagttatcggtatttttagtttgttacgtattttttaagagataatgtttttatagattagtaaaatgtatattttaattggttagagtgggttatattgtgttttttataaatttatatgaagttttgagttttagtattttagaatgtggttgtttttggagatggggtttttaaagaggtgattaatgtgcgggtgtggtggtttatttttgtaattttagtattttgggaggttgaggtaggtagattatttaaggttaggagtttaagattagtttggttaatatggtgaaattttatttttattaaaaatataaaaagtagtcgggtgtggcggtaggtgtttgtaattttagttatttaggaggttgaggtaggagaattatttgaattcgggaggtggaggttgtagtgagtcgagattgtgttattgtatattttagtttgggcgatagagtgagattgttttaaaaaaaaaaaaaaaaaaaaaaaaaaagagaggtgattatggtaaaatgagattatatgggcgggtttaaatttaatttgattggtatttttttaataagaggagattagtatagaggtatatatagagggatggttattcgaggatatagagaatagatgagtatatggttgtttataagttaaggggttttagaagaaattaattttgttgatatttttattttggatttttagtttgtagaaatatgagataataaatttatgtggtttaaattatttagtttatggtattttgtttatagtagttttagtaaataaatatattggttaagaatatattagtagttgggtacggtggcgtacgattgtaattttattattttgggaggttaaggcgggaggattatttgaggttagaagatggagattagtttggttaatatggtgaaatttcgtttttattaaaaatataaaaaattagttaggcgtggtggcgggcgtttgtaattttagttatgtgggtttggaaaatttataggtgttttttttatgggtagttttagttaattttttaataaggttatagtaagtagggtttttcgtttgttttttgtttgtttgttttgtttttttgttttgagatagagtttcgttttgttgtttaggcgggagagtagtggcgtagttttgttggagagtagtggtataattttagtttattgtaatttttattttttgggtttaggtgattattttgttttagttttttgagtagttgggattatagatatgggttattatgttcggttaatttttgtatttttagtagaggtgaggttttattatgttggttaggttggattttaatttttgattttaagtgatttgtttatttcggttttttaaagtgttgggattatagacgtgagttatagtatttagtcgatttttcgtttgaagagataggatatatattatagaagtaaagacgtatttttgattttttttttgtagtagtaaaagtacgtcggttagtaggatagttaggatatttgggaaaatagtatggaaggatgtattttaaaagttttatagttaggaggttttgttggttattttcgcggatgttattttttaggaaggtgtaagtagtatgatgtttttgtttgggtttagaagttttttttttgttttgtttgtattttttattatttttttaggttttaatttttagtattaacgagtagtcggagttttttttaagtttttttcgtgtttagagtttaaattagggttttcgtttatgttaggttattgtgttcggtaattttttttgttgtaataatatttgttgggtttgatttttgagaatttgatacggtttggttgcgtttttatttatattttattttgaatttttacgtgttgtaagagggatttggtgggaggtaattgaattatgggggtagattttttttatgtcgttttcgtgatagtgaatgagttttataagatttgatagttttataagggggagtttttttgtataagttttttttttttttgtttgttgttatttatgtaagatttgatttgttttttttgttttttgttatgattgtgaggtttttttttataggtggaattgtttaagtttattaaatttttttttttggtaagttgtttagttttaggtatgtttttattagtagtatgaatacggattaatataatatttttttttttgatgttttagatgtgaacggagttttttgttttttttgtttttgggttattaggattcgagttatagtagcgatgtaggttaggggtggttttagttttttcgtgttttttagttttttttggcgttttgtttttgtatgaatttttcgtgttgtaaggttttttgtatatagatgtaaattttgagttgcgttttaagggtaacgttatttttggggagttgtttttaatatttttgtttaagttagatacgtttttgttaatttttttatattgtagtttgttggtttttttaaagtatgtgttggatttttaattagttttttcgttttttggtttgttttttttttttagtttagtgattgatgttttaaaaggttaggtattaggttttgttcggtggggtgtatttttattatttaattcggcgtttggtaggtagaaggcgttaaatttgtttgcgaaatatacgtttatttaaa

SEQ ID NO: 117 - DNA, 15597 bp, Artificial Sequence
  chemically treated genomic DNA (Homo sapiens)
ttttgtcgttggtaattttttttcgaaagcgtaaacgtttttagggagttattaggaatagatgtggatgggtagtttttatttagggtatagttgttatttattcggtttagaattgggaagtcggtcgggtatagtggtttacgtttgtaattttagtattttgggaggtcgaggcgggtaggttatttaaggttaggagtttaagattagtttgacgaatatggtgaaattttatttttattaaaaatataaaaaattagttaggtatggtggtggatatttgtaattttagttatttaggaggttaaggtaggagaattatttgaatttaggaggtagaggttgtagcgagtcgagattgcgtttttgcgttttagtttggtaatagagggagatttttttttaaaataataaaataaaaacgaattgtgacgtttatttaagtaggaggtattttttatgtaaaggtatagcgtgttttttggaataggcgtttgggagaatcgatttatttatttgttgtgtagttttgtcggcgagtagcgcgaattttatagataggttttttagagtttgttttagggatttttacgtgttgttatttagagcggtttaggagggtagcggggtcgtgttagattttattgtattgagggagtaagtatataggagaggagatatttaaggtttggagtttatttggtagtcgagtttggtatttttttcgatagatgttttttacggtaatttgcgtgatttcgttttaggattttgttgtttaaagagtggtttgtggggattttgggagttcgggagaaagggtggttttggggttgtattttaggatttgttgcgttttttttttttaattagtttttaggtgatatgtgtgtataggtgacgggtattgttggggtaagtagagtttcgggtggggttttttttttttttaggtaaaggaagcgttgttagtttatggtttgtttttttttaagttaaagggattttttttttttttgagacggagtttcgttgtattatttaggttggagtgtagtggcgcgatttcggtttattgtaattttcgttttttaggtttaagtaattttttgttttagtttttcgagtagttgagatgataggtattcgttattacgtttagagaatttttttttgtatttttagtagagacgggttttattattttggttaggttgattttgaatttttgatttcgtgatttatttatttcggttttttaaagtgttgggattataggtgtgagttattacgtttggtttgggatttttttttaaagttttattttgatagtgaaaaaattattagattagaaattggtgagtatttattcgtgtttagaaattcgtgttttagggtcgaaattttttcgtgttttttttaaatatgattttttatgtgtttgagttattttttgttttttttgagatgaaataggttaggatgttggttattacggtaaacgtatttttcgtttaagttttttattagtatggattttcgttttatcgcgcgtgtttttgtagaagttgaaaggttatttattttagttttttttcgaatatgagaagatttgtcgtattgtcgatggttcgcgatgcgattcgttcggttttgtcgcgaagtttgtgaaagttattgtagatgtttcggattagttttcggttgatggtaaattgagtttggatgttagttgggaggaagttttgatattatgatggggggagagatattgtgttagtcgttggggagtatttgttagacggtagtagtcggttttttagaagttgagttacgggagatatagtaggtttatgagttatttcgggagttttatttttttaggtttgtagggattattttgtgtgtttaaaaaagaaataaaaattattattatttgtatgttataaatataaagataaatgattttatgggatgaggattatagagtttattgaaattttattatattggaggatttatttaaaaatatttaaataaggttaggggtagttatttatatttgtaattttagtattttggaggttgaggtaggtggattattttaggttaggagtttaagattagtttgattaatatggtgaaattttatttttattaaaaatataaaaattagttgggtatggcggtatgtatttgtaattttagttattttagaggttgagataggagaattgtttgaattcgggaggtagaggttgtagtgagttgagatcgcgtaattatattttagtttgggcgatagaacgagattttgttttaaaataaataaattaataaaatattcgaataataattttgtcgggcgtagtggtttacgtttgtaattttagtattttgggaggtcgagtagggcgaattacgaggtaaggagatcgagattatggtgaaattttatttttattaaaaatataaaaaattagtcgagtttggtggtgggtatttagttttagttatttgggaggttgaggtaggagaatggtatgaatttcggaggcggagtttgtagtgagttgcgattatattattgtattttagtttgggtaatagagcgagatttcgttttaaaaattaataatattaatttttagttggatatagtgatttatatttgtattttagcgttttgggagattgaggtaagaggattgttagagtttgggagtttaagaatagtttgggtaatatagtgaaattttattttttttaaaaaattaaaaaattagttaggcgtggtggagcgtttgtggttttaggtgtttatagagggttgaggtaggaggattatttgagtttaggagttttatgttgtaaggagttatgattataatattgtattttagtttggggattttgtttttagaaaataataaaaataaaaataaataatttttaagttaaatataatgaatataaatttttgaaagattttttatatggggggaaggttttttttatgtcgcgtttatttttaaagattttttataagatttgatattaattattagagtttagaaaatagaaagtttagagagtaaaatgaaggtaaaagatttggttaggtatggtggtttatgtttttaattttagtattttggggggttatgttaggaggattgtttgaggttaagagtttaagattagtttgggtaatatagtgagattttatttatattaaaaataaataaataaattagttaagtattgtggtgtatgtttgtggttttagttattttgggaggttgaagtgggagaattgtttgaatttaggaggtcgaggttgtaatgatttacgattgtattattgtattatagtttagaggatagagtaagattttgttttaaaaaataaaataaaatagatttttaatttttgtatgaagaagtaggtttttttttggtttttttgttgttgttgttgtcgtttttgatataaagttttattttgttatttaggttggagtgtaatggtacgatttgggtttattgtagtttttgttttttgggtttaagtagtttttttgttttagttttttaaatagttgggattataggtgtttgttattaagtttggttaatttttttttttttttttttgatggtgtttttgtcgtttaggttggagtgtagtggcgtaattttggtttattttaattttttttttttaggtttaagtaatttttttgttttagttttttgagtagttggaattataggtgtacgttatcgtatttagttaatttttgtatttttagtagaggcggggttttattatgttagttaggttagttttgaatttttgatttcgtgatttattcgtttcggttttttaaagtgttaggattataggcgtaagttattacgttcggtcggttttttggggtttgttttgtttttttttgttttttttttttgttttgtatttttattagagatggggttttgttatgttggttaggttggttttaaatttttgattttaagtgattcgatagttttagttttttaaagtgttgggattataggaaggagttatcgcgttagtttgaagaagaggtttaaaaagaaaaaattaaaaataaaaaaattattaagtagttattttagttttttttggaaaaagattaaattttaaatatttaataataaataaatgtaataatgaatttttagaaatttgaaaaggtgttgatataagtattcgtttgtttgagttatagaaaagggtagagggtacgaggtgtttggagggtttgagggtagagtttagtcgtaattcggttttgttgtttagaggttcggggttttggtaaatgatagtttttttgagtttgtttttttattcgtaaaataggttttttagttttgtgtcggagtaattgaaacgagggttaaatgaggaaattatgcgatagatgttagtataatttttgttacgtagaggaggtaaaattattttgaagggttaaaatttgtttttttggttaaaaagggatgtattttttaaagttagaaaaatattttggtttttttttttttttttttttttttttttttttttttttttttttttattttatagttttttttttatgcggagtcgaagttggattgtattgttgttatttcggtttattgtaatttttttgtttgatttttttgttttagtttgtcgaatgtttgcgattgtaggtacgcgtcgttacgtttgattggttttggtggagacggggtttcgttgtgttggtcgggtcggtttttagtttttaatcgcgagtgattcgttaatttcggtttttcgaggtgtcgggattgtagacggagtttcgtttatttagtgtttaatggtgtttaggttggagtgtagtgacgtgatttcggtttattataatttatattttttagtcgtttgttttggttttttaaagtgtcgagattgtagtttttgttcggtcgttatttcgtttgggaagtgaggagtgtttttgtttggtcgtttatcgtttgggatgtgaggagtttttttgtttggttgtttagtttggaaagtgaggagcgttttcgttcggtcgttattttatttaggaagtgaggagcgtttttttttagtcgttattatatttaggaagtgaggagcgtttttgttcggtcgtttatagtttgagatgtggggagcgtttttgtttcgtcgttttatttgggatgtgaggagcgtttttgttcggtcgagatttcgtttgggaggtgaggagcgtttttgttcggttagttatttcgttcgggagggagatgggggggttagttttattatttggttagtcgtttcgttcgggagggaggtgggggggttagtttttcgtttggttagtcgttttattcgggagggaggtggggggcgttagtttttcgttcggttagtcgttttatttgggatgtgaggagcgtttttgttcggcgagatttcgtttgggaggtgaggagcgtttttgttcggtcgtttcgtttgagaagtgaggagattttttgtttggtaattatttcgtttgagaagtgaggagttttttcgttcggtagttgttttgtttgagaagtgaggagttttttcgttcggtagttattttatttgggaagtgaggagcgttttcgttcggtagttattttattcgggagggaggtggggggggttagtttttcgttcggttagtcgttttattcgggagggaggtggggggttagttttttcgttcggttagtcgtgttattcgggagggaggtgggggggttagtttttcgtttggttagtcgttttgttcgggagggaggtgggggggttagtttttcgtttagttagtcgtttcgtttgggaggtgaggggcgtttttgttcggtcgtttttattgggaagtgaggagtttttttgtttagttagtcgtttcgttcgggagggaggtggggggggttagttttttagttcggttagtcgtttcgttcgggaggtgaggggcgtttttgttcggtcgtttttattgggaagtgaggaggttttttgttcggttagtcgtttcgttcgggagggaggtgggggggttagtttttcgttcggttagtcgtttcgttcgggagggaggtgggggggggttagtttttttgtttggttagtcgtttcgttcgggaggtgaggggcgtttttgttcggttatttttattgggaagtgaggagtttttttgttcggttattatttcgtttgggaggtgtgtttaatagtttattgagaacgggttaggatgataatggcggttttgtggaatagaaaggcgggaaaggtggggaaaagattgagaaatcggatggttgtcgtgtttgtgtagaaagaagtagatatgggagattttttattttgttttgtattaagaaaaatttttttgttttgggattttgttgatttgtgattttatttttaattttgtgttgtgtttatttagggttaaatggattaagggcggtgtaggatgtgttttgttaaatagatgtttgaaggtagtatgttcgttaagagttattattattttttaattttaagtaattagggatataaatattgcggaaggtcgtagggttttttgtttaggaaaattagagatttttgtttatttgtttatttgttgattttttttttattattgttttatgattttgttaaatttttttttgcgagaaatatttaagaatgattaataaaaaaataaattaaaaaaaaaaaaaaagaaaaaaaaaagaaaaatattttggttttggtagttagtttatagtttaggaattcgttttcgacgtattgtgttgatttttttaatttgttttgtatattttgtaaaaggaaaatatatagttttatttttttttattagtagtaagaaagttgttgtggggtatgggttattgtggagcgggaggtcgtttttttttaggagaaatatatttttatatgttggttttgatattagtattttgtaattttttgatttttttttagatgttttttttattaaataggatagtttggttttatagtaggagtattataaatttgtagtttttttttagaggtatagttattttattcgtagacggggggtagttttttagagaaatagttattttatttatagattaggggcggttttgtagagaaacggtttttttatttatagattcggggcggcgttagttttagagatatttgagattttggtagtttttaaaaacgtaatagaatagggtaaaagtgtttttttttttgggaatgtatttatggcgttagggatattagagtttagggagttgttgggtagagggataggtttagtttttggtatcggagtttttttatttgaaagaggttttttgggtaaagtcgtgttttaaagttaggagttatttaggagatataaggggaaattttaatatgtagttgtttgcgtgtttaggaatttttaggttttagagatgttttaaagattatttgatttaatttttattttataaaaaaaaaaaaaaaaaaaaaaaaaaagatttgaggtttagtatggtgcgtgtttgtagttttagttatttagagtttgaggcgggaggatcgttggagtttaggggtttagggttagtttgggtaatatagtgagattttatttttaaaaatagaaagtaagtaagaaaattgaggtcgggaagtgatagagaatgatatttgtgggaaggttatagggaacgttttgtttttagaatagggatattgtttatttgtgatttattgtatttttgtttatcgttttttttaggttttgttatatttttttgttggtaatgtagatcgtttttaaaggaaggtttttaattttagggtttaaaagattttattgtttgttttagatattttcgggggtattttagggatattttaggtatagggggaaggtttttttgttttcgagaggaacgaagataaaaggaattaaggtttgtgtgaagttagtttgggagagggggtgtttttttgtagtagggataaggatagaggtcgttaggtttttatttaagacggggtttttttgaaatagaggagagtttggaaatttttattttagtggagttttcgttttttttcgtatagggagagggttttgtaggtataggtggaggagaagtataggattcgttttttttggaggggttggtagttgtttttttttttaggaaataggagttgggttgtagggttgttttttgtttttttgagatagggttttattttgtcgtttaggttggagtgtagtggtataattatagtttattgtaagttttattttttgggtttaagcgatttttatgttttagttttttaagtgattgggattataggtgtgtattattatgtttggttttagttttgttttggtagagacgaagtttcgttatgttgtttaggttggttttaaacgtttgggtttaagggattatttagtttcggttttttcgagcgttgggattagaggcgtgggttattgtatttgcgaattgtagttttttgatatataataaggttgtgtcgtagtagttgggaggagggaagttttatttagatttttgacggagtgtatgtataataagttaattttcggatgtaggtgtgggttgtggttttgataaggaggtttagtttgtgttttagtggtttttagttagatagggttttgttttaagttaatatttttttttatttggagtttttggtatttttttaaattttttaaattatttagtttaaatttttaaagtgattatagagatttatgatttttacgcggatttataaaattttgtaaagttaatattagggatatttttgaaaattatatttagattgttatttggaaaggaaagaagttttgtttatgttatttttgttgggcgtttaaataagggattaggaggataagaaattatatttgagagaggaaaaggcgggttcggaggttcggggatttttcggggtcgggatatgggtagggtagatatatttatcgagtcgttgaaggataggaagagtttgaggattatattttcggagaatagggggtgtcgcgttattaggttgacgaagcgttttagggttttttttttggtttcgatgaattttttgttagttggaggagtatacggggttattggatagagtttagggcgtcggtttttattttttgttttgggcgagtttttaaaattttttttagaggtggtagagggtttagcggttagtagagggtattggttgggtttttagtgttgtttagataatgggtttgaaaaggtcgtttagagtaataattttatttttagaggttttttttagttatatatatttgggtttaggagttgttaaggaaaattatagatttgtttgtttttatcgggagttttgggaattacgtgagtggttattttaattattttcgttaaagatattttttataatttttttttggtattttttattgtaaataaatgggttttgttacgttttaatattaacgtaatttaggttttttttttttttttttttttttgagatagagtttcgtttttgttgtttaggttggagtgtagtggcgtaatttcggtttattgttattttcgttttttaggtttaagcgatttttttgttttagtttttggaattagttgggattataggggttcgttaatatgtttggttaatttttgtatttttagtagagatggggttttattatgttggttacgttggtttttaatttttgattttaggtgatttatttgtttcggttttttaaagtgttgatattataggcgtaagttatcgcgttcggtcgagtttttttatttattgtgtttataatttattttgtaaaggatgtaattatttattgtttttattcgggttaaatatttttattttaaggggaaaaaaagtaaaagtatatattgatgtatttaggatattttaatttgaatataaataaaaatggtatttaaatattttttttgagacggagttttatttttgtcgtttaggttggagtgtagtggtgttatttcggtttattgtaatttttaatttttaggtttaagcgatttttttgttttagttttttaagtagttgggattataggtattcgttattatatttggttaatgtttatatttttattagagaggaggttttattatgttggttatgttggtttcgaatttttgattttaggtgattcgtttattttagttttttaaagtgttgggattataggtatgagttattagcgtttagtttttaaatattatttttaatgtattaagaaatatagttaggagtgtggtttatatttgtaattttagttttttgggaggttgaggagggtagattatttgaggttaaggagttttatattagtttggttagcgtagcgaaattttgtttttgaaaaatattataaaagaggttaggcgtagtggtttatatttgtaattttagtattttgggaggttgaggtaggtggattatgaggttaggagattgagattattttaatacggtgaaattttatttttattaaaaatataaaaaaaaataattagttaggcgtggtggcgggcgtttgtagttttagttatttgggagatttaggtaggagaatggcgtgaattcggtaggcggagtttgtagtgagtcgagatcgtattattgtattttagtttgggtgatacggcgagttttcgttttaaaaataaaaataaaaataaaaaatattataaaagaggttaggtgcggtggtttatatttgtaattttagtattttgggaggttgaggtgcgcggattacgaggttaggagattgagattattttggttaatacggtgaaatttcgtttttattaaaaatataaaaaaattagttaggcgtggtggcgggcgtttgtagttttagttacgcgggaggttgaggtaggagaatggcgtgaattcgggaggcggagtttgttatgagtcgagattgtattattgtattttagtttgggcgatagagcgagattttatgtaaaaaaaaaaaaaaaatattataaaagaaagaaaataaataatataggtaggtggttggggtttttttttggtttagtattggtaggtttttttcgatgaggttgtatttttttaaatgcgtaagcggtttagcgcgcgtgtgtagtttttaggcgttgaacgttagttagcgtttattaattcggatgtttaggtttgagttagtattatatatttttgtcgcgttttttgttttttgttgttttgagcgttcgtgtgttttttagcgtgagttgaatgatttgttttgtggtttttatatgcggcggggtgaaaattatattattagattttgggttgtttgtttagtgatcgatgagaggtagaagtatttatgtattatcgtacgattttagatgcggggaattggcgattgtgttagtttttatgttgcgttttcgtttaggatacggtgattgtggaagggttgggaacggtagaaagttatgattagttttaagtatttatttttttagtatgttttatttagaatttgaggaacgggttgagggagagattattagtgagattagagttggtagtcgttattttaagttttgtagtttagggggatataggtttggggagtagttttgaggtcgtttgcgattttttatttggttcgaggttatttttaggtagagaggtgaaggtgaggtagtcgtgtgttgtttttttttttttgtaagatgtagttgatattttttatttgtataatttagtttttttttatgaggttatcgagcgtttttatggtgtttatggtttaggttgttatggttttgtagatgtaggtagggtaatgttagttaggtgagtatatagtgtttttggtagttttttcgggagttttcgggagttttggttattgtattttggagaggagaattagggtttttttttatatttgtatagtaagggtttttttatttgttagttatgtagttgaaggttttggtgggttaaggttgtcgggtgttagtttttttgtttgtattaaggttgggtttaagttatagttttgttttagatgttaaaaggttggagtttttttcgtagttttgtatttgtttcggtttatagtggggtttatttttgagttaggattatagggtttaggagatgggttcgtttttttcgttttcggtgggtagtacgtttggttttattttttagtatttttttgggtggtagggtaggtattatacggtaggggaatttgtgtaggagtattttttggaagattacgaagttattgtatcgtttgtatatcgaggatttgaagcgttgtaagagaagggtcggtgtttagattcgacgttggaaattatgttgtcgcgttatttttttttaatagagttcgggaaaacgatagtattaagtgtatttttttttattaggtttttattaaatggagaaattttgtgacggtttcgtatatggaaatataatttttaaattttgtatagtttttaggtcgggtgcggtggttttcgtttgtaattttagtattttgggaggttgaggcgggtgaattatttgaggttaggagttaaagagattagtttggttaatatggtaaaattttatttttattaaaaatataaaaattagttgggtatggtggtgggcggttgtagttttagttattttggagtttgaggtaggagaattttttgaattttggagatagaggttgtagtgatttaagatcgtgttattgtattttagtttggacgataaagcgagattttgttttaaaaaaattaaaaaaggtcgggcgcggtggtttacgtttgtatttttagtattttgggaggtcgagataggcggattatgaggttaggagatcgagattattttggttaatacggtgaaatttcgtttttattaaaaatataaaaaattagtcgggcgtggtggtgggtatttgtagttttagttatttaggaagttgaggtaggagaatggcgtgaattcgggaggtagagtttgcggtgagttgagattacgttattgtattttagtttgggcggtagagcgagattttattttaaaaaaaaaaaaaaaattaaataaatggtatgaagtatagtggttttttatttggttagtgattggttcgttatatatatattagggtgattaaattgtttttttgataaatgttttttatgtggtaatgaatttatttaagggacgggtagtttagtaagattggataaaaggttagtcgttggttttttggtaggtaacggtacgttttatacgtttagagttgttttatttttaggttgttaggttttagaaggaaggggtggttcgttttgttttttcgtggtattttattagttggtttatattttcgattgcggtttagagggtcgggaattacggtaaagttagatagtaaggcggttttgatacggttttttaagggagtttttttttttgattcgttttgttttttggtagtagtattgataattattcggatcgtgtggttataggttttggaatatagtgaagtatagtagagtagacggtagggaggggagatcggttcgtttgtttttaaggttaggtgtagtggtttatgtttgtgagtttagtattttggcgggttaaagtgagaggattgtttgagtttaggagttcgagattagttgagataatatagtaagtttttatttgtattttaaaaaaaaaaaaaaaaaaaagattgggtatggtggtttacgtttgtaattttagtattttgggaaattaaggtaggaggattatttgagtttaggagtttaagattagtttggataatatagtgagattttatttttataaataatttaaaaaattgtttggtgtggtggtattcgtttgtggttttagttatttaggagattgaggtgggagggttgtttgagtttgggaggttgaggttgtagtgagttatgatcgtgttattgtattttagtttggttgatagagtaatattttgtttttttaaaaataagtaaataaaaagatataatttttatttaggattatttgtttatgacgttttttaaataagtttttggtagtgtcgttcggtcggggttgggttagggtcgtttttttttatataggagtgggttttgttttgtttgtgcgaattttataagttttgttgattttatattttttaaggatagtgttagtttattaattatttaatgtttaggatgaataatgaaaatttttattagaatttgtcgtaatggaattgagataacgaagtaagggatagagagagttacggtgttgttttagacgggtattaggtattcggtgtttgtgttttatttgtttaatatcgggatgtttagtaataggagggtcgtgttattaaaggggattagagtgatatatattgattttgttatgtaaattttatttattgtttggggttcggagtcgatggggttgatattttaattttcgggggttttttattattataaagcgaggttggtgtggatttcgttttgtgttttgtggatcgttcgcgggagatttttaagaaataggtttttaggtcgggcgcggtggtttacgttagtaattttagtattttgggaggtcgaggcgggtggattataaggttaggagattaagattattttggttaatatggtgaaattttgtttttattaaaaaaaaaaatataaaaaaatttgttaggcgtggtggcgggtatttgttattttagttatttgggaggttgaggtaggagaatcgtttgaattcgggaggtagagtttgtagtgagtcgagattatgttattgtattttagtttgggcgatagagtaagattttatatcggggaaaaaaaaaaaagaaataggattttagagtatagtggtggggaggataaattggattaggggtgattaggtggggacgtggttgggttagagtgaggtgcggggagtagaggtgtggaaaagttattttcgtagtttgattttgttgcgagttttggattttgtttgtaagttagttatatagatttattttttagtttttttttgttatattatttttgttttgagatgttgagacgtgattttttttttttttttttgtttcgatatatatataatttgttagttatttggttggaaattttatattttatatgttttaggaagaggtttttttttttcggaatgagttttatttgtacggtgtttttggttagtagtttttgtagggtgtgggatagtagtagcgggtttttttgcggtatttgtattcgattgggggttgggatttgttgtacgatggtttggggttcgatggtttggggtgtcggtagattt

SEQ ID NO: 118 - DNA, 15597 bp, Artificial Sequence
  chemically treated genomic DNA (Homo sapiens)
agatttgtcgatattttaggttatcgagttttaggttatcgtgtagtaggttttagtttttagtcgaatgtagatgtcgtaggggaattcgttgttgttgttttatattttgtaggagttgttggttagggatatcgtgtaggtggagtttatttcggagaagaagggtttttttttgaagtatgtggagtatgaggtttttagttaggtaattggtaaattgtgtgtgtgtcggggtaggagggggaagaaagggttacgttttaatattttagggtaggagtggtgtgataggagaaggttgaagggtgagtttgtgtggttggtttataggtaagatttagaattcgtagtagagttaggttgcggaggtgatttttttatatttttgtttttcgtattttattttggtttagttacgtttttatttggttatttttggtttagtttgttttttttattattgtgttttggagttttgtttttttttttttttttttcgatgtggagttttgttttgtcgtttaggttggagtgtagtggtatgatttcggtttattgtaaattttgtttttcgggtttaagcgatttttttgttttagttttttaagtagttgggatgataggtgttcgttattacgtttggtaaatttttttgtatttttttttttagtagagatagggttttattatgttagttagggtggttttgattttttgattttatgatttattcgtttcggttttttaaagtgttgggattattggcgtgagttatcgcgttcggtttggaggtttgttttttaggaatttttcgcggacggtttatagagtataaagcgggatttatattagtttcgttttgtaatagtgggaaattttcgaggattagaatgttagttttatcgatttcggattttaaatagtgaatgaaatttgtatggtaggattaatatgtgttattttaattttttttaataatacggtttttttgttgttgggtatttcgatattgggtaggtgagatatagatatcgagtgtttgatgttcgtttggagtaatatcgtggttttttttgttttttgtttcgttgttttagttttattacgatagattttgatgggagtttttattgtttattttgggtattgagtaattgatgagttaatattgtttttgggaggtgtggagttagtagggtttgtgggattcgtatagatagagtagggtttatttttgtgtgggagagggcggttttggtttagtttcggtcggacggtattgttaggggtttgtttgaaaagcgttatgagtagatggttttgggtaaaagttgtgtttttttgtttgtttgtttttaaagagatagggtattgttttgttaattaggttggagtgtagtggtacgattatagtttattatagttttaattttttaggtttaagtaatttttttattttagttttttgagtagttggaattataggcggatgttattatattaggtagttttttaaattatttgtagagatgggattttattatattgtttaggttggttttgagtttttgggtttaagtggtttttttgttttggttttttaaagtgttgggattataggcgtgagttattatgtttagttttttttttttttttttttttaaagtataaatggagatttgttatgttgttttagttggtttcgaatttttgggtttaagtagtttttttattttggttcgttaaagtgttaggtttataggtatgagttattgtatttggttttaaggataagcgagtcggttttttttttttgtcgtttgttttgttgtgttttattgtgttttagagtttgtggttatacggttcgaatggttgttagtattgttattaaaggataaagcgggttagaggggaggatttttttggaggatcgtgttagagtcgttttgttgtttggttttgtcgtggttttcggttttttgggtcgtagtcggggatgtggattagttggtgggatgttacgggggagtagagcgagttattttttttttttggggtttggtagtttgggggtgaggtaattttgagcgtgtgagacgtgtcgttgtttgttagggagttagcggttggttttttgtttagttttattaagttgttcgttttttaagtaaatttattgttatatagggaatatttgttaagggggtagtttggttattttgatgtgtgtgtaacgggttagttattgattaggtgggaagttattatgttttatattatttgtttagttttttttttttttttgaaatggagtttcgttttgtcgtttaggttggagtgtagtggcgtgattttagtttatcgtaagttttgtttttcgggtttacgttatttttttgttttagttttttgagtagttgggattataggtgtttattattacgttcggttaattttttgtgtttttagtagagacgaggttttatcgtgttggttaggatggtttcgattttttgattttatgattcgtttgtttcggttttttaaagtgttgggaatgtaggcgtgagttatcgcgttcggttttttttaatttttttaagataaggtttcgttttgtcgtttaggttagagtgtagtggtacgattttggattattgtaatttttgtttttagggtttaagggatttttttgttttaggttttaaagtagttgggattatagtcgtttattattatgtttagttaatttttgtatttttagtagagatgggattttgttatgttggttaggttggtttttttaatttttgattttaggtgatttattcgttttaattttttagaatgttgagattataggcgggagttatcgtattcggtttaagagttatataaagtttaaaagttgtatttttatatacgaagtcgttatagggtttttttatttagtaaaggtttggtgagagaagatgtatttggtgttgtcgttttttcgggttttgttgaggggaagtgacgcgatagtatagtttttaacgtcggatttaagtatcgattttttttttgtagcgttttaagttttcggtatatagacggtataatgatttcgtggttttttaggagatgtttttgtataagtttttttatcgtatggtgtttgttttgttatttaagagaatgttgggaggtaaagttaggcgtgttgtttatcgggggcggagggagcgagtttattttttggattttgtggttttggtttagggatggattttattgtagatcggggtaggtgtagggttgcgggggaaattttagttttttggtatttgggatagagttgtggtttgagtttagttttggtgtaggtagggagattggtattcggtagttttggtttattagagtttttagttgtatgattgataggtggggaagtttttgttgtgtaggtgtgaaagagaattttagtttttttttttagagtgtagtggttagggttttcgagagttttcgagagggttgttaggagtattgtgtgtttatttggttggtattgttttgtttgtatttgtaaagttatggtagtttgagttatgggtattatgggagcgttcggtggttttatggaagagaattgagttgtgtaagtaggaaatgttagttgtattttgtaggagagaaaaagtagtatacggttgttttatttttatttttttgtttgaagatggtttcgggttaggtgggagatcgtagacgattttagagttgttttttaggtttgtgtttttttgggttgtagagtttgggatggcggttgttagttttgattttattggtggttttttttttagttcgttttttaaattttgaataaaatatgttggggaaatgagtgtttagagttgattatggttttttgtcgtttttagtttttttatagttatcgtgttttggacggggacgtagtatgggagttaatatagtcgttagtttttcgtatttgaaatcgtacgatgatgtataaatgtttttgttttttatcggttattgagtaagtagtttagggtttgatgatgtgatttttatttcgtcgtatgtgaaggttatagagtagattatttagtttacgttgaagggtatacgggcgtttagggtagtagagagtagaggacgcgatagggatgtgtgatgttggtttaggtttgggtattcgagttgatgagcgttggttggcgtttagcgtttggaaattgtatacgcgcgttgggtcgtttgcgtatttaaggaagtgtagttttatcggaagaggtttgttagtgttgagttaggagggagttttagttatttatttgtattgtttgtttttttttttttatggtgttttttttttttttttatatggagtttcgttttgtcgtttaggttggagtgtagtggtgtaatttcggtttatggtaagtttcgtttttcgggtttacgttatttttttgttttagtttttcgcgtagttgggattataggcgttcgttattacgtttggttaatttttttgtatttttagtagagacggggttttatcgtgttagttaggatggttttaattttttgatttcgtgattcgcgtattttagttttttaaagtgttgggattataggtgtgagttatcgtatttggttttttttatggtgttttttgtttttgtttttgtttttgagacgaagattcgtcgtgttatttaggttggagtgtagtggtgcggtttcggtttattgtaagtttcgtttgtcgggtttacgttatttttttgtttgagttttttaagtagttgggattataggcgttcgttattacgtttggttaattatttttttttgtatttttagtggagatggggttttatcgtgttaggatggttttaattttttgattttatgatttatttgttttagttttttaaagtgttgggattataggtgtgagttattgcgtttggttttttttatggtattttttagagatagggtttcgttacgttggttaggttgatgtagaattttttggttttaagtgatttgttttttttagttttttaagaggttgggattataggtgtgagttatatttttggttgtattttttaatatattaaaaatagtatttaaaggttgggcgttggtggtttatgtttgtaattttagtattttgggaggttgaggtgggcggattatttgaggttaggagttcgagattagtatgattaatatggtgaaattttttttttaataaaagtataaatattagttaggtgtggtggcgggtgtttgtaattttagttatttgggaggttgaggtaggagaatcgtttgaatttgggagttagaggttgtagtgagtcgagatgatattattgtattttagtttgggcgataagagtgaaatttcgttttaaaaaaagtatttaaatattatttttgtttgtgtttagattgaaatgttttgaatgtattagtatatgtttttattttttttttttttggagtgaaaatatttaattcgaatgaaagtaatgagtaattgtattttttgtagagtaagttataagtatagtgaatagaaaaattcggtcgggcgcggtggtttacgtttgtaatattagtattttgggaggtcgaggtaggtggattatttgaggttaggagttggagattagcgtgattaatatggtgaaattttatttttattaaaaatataaaaattagttaggtatgttggcgggtttttgtaattttagttaattttagaggttgagataggagaatcgtttgaatttggaaggcggaggtagtagtgagtcgagattgcgttattgtattttagtttgggtaataggagcgaaattttgttttaaaaaaaaaaaaaagaaaagaagatttgggttgcgttagtgttagagcgtagtaaaatttatttgtttgtagtgagaagtgttaggaggggattatggaagatgtttttaacggaggtgattaaagtgattatttacgtggtttttaggattttcgatggaaataagtagatttgtggttttttttggtagtttttggatttaagtgtgtgtggttggagggggtttttgggggtgaggttattgttttgggcggtttttttagatttattgtttgagtagtattgggggtttagttagtgttttttgttagtcgttgggttttttgttatttttagggagagttttgagaattcgtttagagtagaagatgggggtcggcgttttggattttgtttagtgatttcgtgtgtttttttagttgatagggagtttatcgaggttaggaggagagttttgaagcgtttcgttaatttggtggcgcgatattttttgtttttcgaggatgtggtttttaagttttttttgttttttagcggttcggtgagtgtgtttgttttgtttatgtttcggtttcggggagttttcgagttttcggattcgttttttttttttttaggtgtggttttttatttttttggttttttgtttggacgtttagtaggaatgatatggataagattttttttttttttagataatagtttgaatgtgatttttagaggtgtttttggtgttgattttgtaggattttgtaaattcgcgtggagattatggatttttgtggttattttgaggatttaggttggatggtttggagggtttagggaggtgttagagattttagatgggaagaagtgttgatttaaaataaggttttgtttgattaaggattattggaatataggttgagtttttttgttagagttatagtttatatttgtattcgggaattaatttgttgtatatgtatttcgttagaggtttgagtggggtttttttttttttagttgttgcggtatagttttattgtgtgttaagaagttatagttcgtaggtatagtggtttacgtttttaattttagcgttcggagaggtcgaggttggatggttttttaagtttaggcgtttgagattagtttggataatatagcgagatttcgtttttattaaaataaaattgaggttaggtatggtggtgtatatttgtaattttagttatttgggaggttgaggtatgagaatcgtttgaatttaggaggtggagtttgtagtgagttgtgattgtgttattgtattttagtttgggcgatagagtgagattttgttttaaaaaaataaaaaataattttgtagtttagtttttgttttttggaggaggaagtagttgttagtttttttagggaaggcgggttttgtgttttttttttatttgtgtttgtaggattttttttttgtgcggggaggggcgggggttttattggaatagaggtttttaggtttttttttattttagggaaatttcgttttgaatggggatttgacggtttttgtttttgtttttgttgtaggaagatatttttttttttaggttgattttatataagttttggttttttttgttttcgtttttttcggaggtagaggggttttttttttgtgtttgagatgtttttgggatgttttcggggatgtttggagtaggtagtgggattttttgagttttggggttggaaatttttttttggaggcgatttgtattgttagtagaggaatgtggtaggatttgggaggggcggtgggtaggggtgtagtgggttataggtgggtaatatttttgttttgggggtaggacgttttttgtggtttttttataggtattattttttgttatttttcggttttagtttttttgtttgttttttgtttttagagatggggttttattatgttatttaggttggttttgaatttttgggttttagcgattttttcgttttaggttttgagtagttgggattataggtacgtattatgttgggttttaggtttttttttttttttttttttttttttttgtaaaatgagagttgagttagatgatttttaaggtatttttgaaatttgagaatttttggatacgtaaatagttgtatattagggtttttttttgtattttttgggtggtttttgattttaaggtacggttttgtttaggaggttttttttagatgagagggtttcggtgttaggggttgggtttgtttttttgtttagtagttttttgggttttggtgtttttggcgttatggatgtatttttaggaaggaagatatttttgttttgttttattgcgtttttggaagttattagggttttaggtatttttggggttgacgtcgtttcgggtttgtggatggaggggtcgtttttttgtagagtcgtttttggtttgtggatggagtggttgtttttttggagagttgtttttcgtttgcggatggagtggttgtgtttttggagagaggttgtaggtttgtggtgtttttgttgtgaagttaggttgttttgtttggtgagaaaaatatttaagggagagttaagagattgtagaatattaatgttaaagttaatatatggaaatgtgttttttttgaggaaagacgatttttcgttttatagtgatttatattttatagtagtttttttgttgttagtagaagagggtgaagttgtgtgttttttttttgtaggatgtgtagaataagttaaaggagttagtatagtgcgtcggggacgaatttttgaattgtaagttggttattagggttaaggtattttttttttttttttttttttttttttttttaatttatttttttattgattatttttgggtgtttttcgtagagggggatttggtagggttatgggataatagtggagggaaggttagtagataaataagtgaataaaggtttttggtttttttaggtagaggattttgcggtttttcgtagtgtttgtgtttttgattatttgagattagggagtggtgatgatttttaacgagtatgttgtttttaagtatttgtttaataaagtatattttgtatcgtttttaatttatttaattttgagtggatatagtatagggttgggggtaaggttatagattaataggattttaaggtagaggaattttttttagtatagaataaaatgaaaagttttttatgtttatttttttttatatagatacggtaattattcgattttttaattttttttttatttttttcgtttttttattttataaagtcgttattgttattttggttcgtttttaatgagttgttgggtatattttttagacggggtggtggtcgggtagaggggttttttattttttagtaggggtggtcgggtagaggcgttttttatttttcggacggggcggttggttaggtaggggggttgatttttttttatttttttttcggacggggcggttggtcgggcggggggttgatttttttatttttttttcggacggggcggttggtcgggtagagggtttttttattttttagtaggggcggtcgggtagaggcgttttttatttttcggacggggcggttggtcgggttggggggttgattttttttatttttttttcggacggggcggttggttgggtagaggggttttttattttttagtaggggcggtcgggtagaggcgttttttattttttagacggggcggttggttgggcggagggttgatttttttatttttttttcggatagggcggttggttaggcggggggttgatttttttatttttttttcggatggtacggttggtcgggcgggggggttgattttttatttttttttcggatggggcggttggtcgggcggggggttgattttttttatttttttttcggatggggtggttgtcgggcggagacgttttttattttttagatggggtggttgtcgggcggagaggttttttattttttagatagggtagttgtcgggcggaggggttttttattttttagacggggtggttgttaggtagagggtttttttattttttagacggggcggtcgggtagagacgttttttattttttagacggggtttcgtcgggtagaggcgttttttatattttagatggggcggttggtcgggcggagggttgacgttttttatttttttttcggatggggcggttggttaggcggggggttgatttttttatttttttttcggacggggcggttggttaggtggtggggttgatttttttatttttttttcggacggggtggttggtcgggtagagacgttttttattttttagacggggtttcggtcgggtagaggcgttttttatattttagatggggcggcggggtagaggcgttttttatattttagattatgggcggtcgggtagagacgttttttattttttagatgtgatggcggttgggaagaggcgttttttattttttagatgggatggcggtcgggcggagacgttttttattttttagattgggtagttaggtagaggggttttttatattttagacgatgggcggttaggtagagatattttttattttttagacggggtggcggtcgggtagaggttgtagtttcggtattttgggaggttaaggtaggcggttgggaggtgtaggttgtagtgagtcgagattacgttattgtattttagtttgggtattattgagtattgagtgaacgagatttcgtttgtaatttcggtatttcgggaggtcgaggttggcggattattcgcggttaggggttggagatcggttcggttaatatagcgaaatttcgtttttattaaaattagttaggcgtggcggcgcgtgtttgtaatcgtaggtattcggtagattgaggtaggagaattaggtagggaggttgtagtgagtcgagatggtagtagtatagtttagtttcggtttcgtatgagagggagattgtggggtgagggagagggagagggggagggggagggggagggggagggagagggttaaggtatttttttaattttgaagagtatatttttttttaattagagaaataagttttaattttttaaagtgattttgttttttttgcgtggtagggattatgttgatatttgtcgtatggtttttttatttaattttcgttttagttgtttcgatatagggttgggaggtttgttttacggatggagaaataggtttagggaggttgttatttgttaaggtttcgagtttttaagtagtagggtcgggttgcggttgagttttgtttttaggttttttaggtatttcgtgttttttgtttttttttgtgatttagatagacggatgtttgtgttagtatttttttagatttttggggatttattgttatatttgtttattattaaatgtttaaagtttggtttttttttaaaaaagattaaggtagttatttggtagtttttttgtttttggttttttttttttaaattttttttttaggttggcgcggtggtttttttttgtaattttagtattttgggaggttgaggttgtcggattatttgaggttaggagtttgagattagtttggttaatatagtaaaattttatttttaataaaaatataaaataaaaaaggaaaataaaaaaaagtaaaataaattttaaaaaatcggtcgggcgtggtggtttacgtttgtaattttagtattttgggaggtcgaggcgggtggattacgaggttaggagtttaagattagtttgattaatatggtgaaatttcgtttttattaaaaatataaaaattagttgggtgcggtggcgtgtatttgtaattttagttatttaggaggttgaggtaggagaattgtttgaatttaggaggaagaggttggagtgagttaagattgcgttattgtattttagtttggacgatagagatattattaaaaaaaagaaaaaaaaaattagttaggtttggtggtaggtatttgtaattttagttatttgggaggttgaggtaagaggattgtttgaatttaggaggtagaggttgtagtgagtttaggtcgtgttattgtattttagtttgggtaatagagtgagattttgtgttaaagacgataataataataataaaaaaattagaaaaaaatttgtttttttatataaaaattaaaaatttattttattttattttttgagataaggttttgttttgttttttaggttatagtgtagtggtgtaatcgtaggttattgtagtttcgattttttgagtttaagtaatttttttattttagttttttagaatagttgggattataggtatgtattatagtatttggttgatttgtttgtttgtttttggtatagatgaagttttattatgttgtttaggttggttttgaatttttggttttaagtaatttttttggtatggttttttaaagtattgggattaaaggtatgagttattatgtttggttaaattttttatttttattttattttttgagttttttgttttttgaattttgatagttagtattaaattttataaaaagtttttgggaataaacgcggtatagaagaggttttttttttatgtggagagttttttaggaatttatgtttattgtgtttaatttgaagattgtttgtttttatttttgttgttttttggggatagggtttttaggttggagtgtagtgttgtgattatggttttttgtagtatggaatttttgggtttaagtgatttttttgttttagttttttgtaagtatttgggattataggcgttttattacgtttggttaattttttgattttttgggagagatggggttttattatgttgtttaggttgtttttaaatttttaggttttagtaatttttttgttttagttttttagagcgttggggtataggtgtgagttattgtatttagttaaagattagtattgttagtttttgagacggagtttcgttttgttgtttaggttggggtgtagtggtgtgatcgtagtttattgtaagtttcgttttcggggtttatgttatttttttgttttagttttttaagtagttgggattaggtgtttattattaggttcggttaattttttgtatttttagtagagatggggttttattatagtttcgatttttttatttcgtgattcgttttattcggttttttaaagtgttgggattataggcgtgagttattgcgttcggtaagattattattcgagtgttttgttggtttgtttgttttgagatagagtttcgttttgtcgtttaaattggagtgtggttgcgcgattttagtttattgtaatttttgtttttcggatttaagtaatttttttgttttagtttttggagtagttgggattataggtgtatgtcgttatgtttagttaatttttgtatttttagtggagatggggttttattatattggttaggttggttttgaatttttgatttgaggtgatttatttgttttagtttttaaagtgttgggattataggtgtgagtgattgtttttggttttatttgagtgtttttggataggttttttagtgtgatgagattttagtggattttgtggtttttattttatgggattatttgtttttgtgtttgtggtatgtaggtgatgatggtttttgttttttttttggatatatagagtgatttttgtaggtttggaggagtggggttttcggggtggtttatggatttgttgtgtttttcgtggtttagtttttgggggatcggttgttgtcgtttgataggtgttttttagcgattaatatagtgtttttttttttattatgatgttaggatttttttttagttgatatttaggtttagtttgttattagtcgggagttgattcggaatatttataatagtttttataagtttcgcgatagggtcgagcggatcgtatcgcgggttatcgataatgcggtagatttttttatattcgggaaggagttaaggtaggtgattttttagtttttgtaggggtacgcgcggtgggacgggaatttatgttggtgaagggtttgggcggaaagtgcgtttatcgtaataattagtattttgatttgttttattttagaaggggtagaaagtggtttaggtatatggggggttatatttggaagaaatacgggagaatttcggttttgaaatacggatttttgagtacgagtaaatgtttattagtttttagtttggtagtttttttattgttaggatgagattttaaaaaaagattttaggttaggcgtggtggtttatatttgtaattttagtattttgggaggtcgaggtgggtggattacgaggttaggagtttaagattagtttggttaagatggtgaaattcgtttttattaaaaatataaaaaaaagttttttgggcgtggtggcgggtgtttgttattttagttattcgggaggttgaggtagagaattgtttgaatttaggaggcggaggttgtagtgagtcgagatcgcgttattgtattttagtttgggtgatatagcgagatttcgttttaaaaaaaaaaaagatttttttgatttggggaagaatagattatgggttggtagcgttttttttgtttgaggggaggggagattttattcgggattttgtttgttttagtagtgttcgttatttgtgtatatatgttatttgggggttggttgggaagaagagacgtagtaggttttgaggtgtagttttagggttattttttttttcgggtttttagggtttttataggttattttttgagtagtagggttttaggacggggttacgtaggttgtcgtggaggatatttgtcgggggggatgttagattcgattgttaggtgagttttaggttttgagtgtttttttttttgtgtgtttgtttttttagtgtaatagggtttgatacgatttcgttgtttttttgggtcgttttgaatagtagtacgtgggggtttttgaagtaggttttgaaaggtttgtttgtggaattcgcgttgttcgtcgataaggttgtataataggtgagtggatcggtttttttaggcgtttgttttagagaatacgttatgtttttgtatggggagtgttttttgtttagatgggcgttatagttcgtttttgttttgttgttttgagaaggagtttttttttgttgttaggttggagcgtaaaggcgtaatttcggttcgttgtaatttttgttttttgggtttaagtgatttttttgttttagttttttgagtagttgggattataggtgtttattattatgtttggttaattttttgtatttttagtagagatgaggttttattatgttcgttaggttggttttgaatttttgattttaggtgatttgttcgtttcggttttttaaagtgttgggattataggcgtgagttattgtgttcggtcggttttttagttttgagtcgagtgaatgatagttgtgttttgggtgggagttgtttatttatatttgtttttggtggttttttgggagcgtttacgttttcgagagggggttgttagcgataaaa

SEQ ID NO: 119 - DNA, 3143 bp, Artificial Sequence
  chemically treated genomic DNA (Homo sapiens)
ttatttaaatggggtcgcgtttcgattattagtgtaatgtgattatttgattttaaacgtaattatgcgtttaaatggttgagtgtaagaggtcggtcggagatagggtcgagtgcgttgttttaagttgcgatttttgttaagtatttacggataatgtattggttttttttagggagcgttttttatttagggtagtagtaggagtggaatttggagtcgtatacgttgggtttgtgatggataagcgcggttacgtaatagataggtagagggatgtagtaatatataaacggttttcgtaagtaatgtttcgagcgagtagattttaggataataaataaattaaaattatattttaaattattggagatcgggaggtagacgtggaagtaaaagagttagatgttggaatgtaggagggttagaaatgtttaaatattgttttttatttgtcgttttttgtttgtttttttaaagggcgaaaagaggtatggaaatatataatttgttattattttagtttttagatgtagagaataaagggattatttcgttttaaagaatttttgtttttttttttaaatttatttttttttggttaattgttattttggtttcgacgtgttaaggaaagcgcgtcgtaaggtggagcgttcgggttgacgatgagaaggtgagttgtgaattttgtatacgtttttaaataaaaggtttacgagcggcggtttcgacgtggggagtaagtaggtttttttggtttttgtagtaggcggatttaggttcgtttgtcgtcggatatttagaatttgttttcgtagcgcgagttttgtatacgttttgcgatcggtatttttggattttttaattattcgtcgtttaattttcggagagagggtttttcgttcgttgagttgcggggttgggaaggaaaagggggacgcgtttttgggggtttttggatattttggtaaagggggttgtagttttaggttttagttaaagggtttgggacggagtgggttagaaagtcgttaaattgaggattttttttttttttaagtcggagttttaggtgcggagtcgtttgtttatttattttcggagtacgttttgttgttttcgtcggcggacgcggttggttattgcggtatttttttcgcgatattcgggcgttagaaattcgtttttagagtttgttgtagcggatcgaatttgttgcggcggcggttggggtcggggcggtttgggcggaggaggttgaggttggtcggtcgtgttttgcgtttagagtattatatagtttagttataggaagtagagttggagatatagttttcgttttttttttatcgtcggcgtcgaaagcgcgcggtcgtagattcgcggagagggagtgattaaagataaaatttgcgcgttttagaaaagagttagggtttaataagtttttcgtcggtttcggggattttttcgggttcgggttttttgttttagttggagatttcgatagagcgtcggttttttgattgttcgcgaagcgagacgcggggcgtcgggtttagcgtagtgagcggcgaggcgcggcggaggtgtagtcggtagtttcgagcggtatacgttgtataatcggtttaaagtttcgagcgattttaggatcgttagcgggcgggggaggaaattataaaagttttggcgtaaaattttaaaaaatgtgaattttaaaagaaaaaagggtttgtacgtagagttcggcggattttcgtgcgtttcgaagacggatattggaaagttgtaaaagttattagaaagaaataggtaagtaaataaaagtcgtttttagaagaagaggagggtttttttcgggttcgttcggagttttatagggtaacgaagcgcgggtagcggttgcggagtcgggcggaggtgcgcggggtcggggcgtgcggttagtaagagagagggcgggaggttgggcgttggagaagatgcggcggtggagggcgcggcgcgggggttttagaggttcggcggggcgcggggcgggtcggcgggcggcggttgttagtgggggcgcggtcgtttatacgtggggtttaattcggattgagaggtcggcgtagagtgggcggggatagagtaagggagagatcgggattgaggaacgaggggaattagggttgggtgaggggaagaggaaggaagggggggagggcgaagggagggaagaggacggagattggggagaaggggggcgaattcgagaggaaggtcgggttggaagagggatttggaaagagggattggcgagttcgggtgcgagaggaaatgagcgggggatgggggcgaagttagggtaaagagagaagtgggaaaggagagggagggttaaggttcgggcgtcgagaggaggggttcggggggtcggttggagggggcgaggcgttaggcggttttgtttttcgttttcgttaattggtcgttagttttgttttgattgtttgtataaagcgagtagacggcgggggatggggcgattagggatcggatttgggaaaggaggtagtagttttttttttttttttttcgttttcgttcggtcgcggattagggattagggtgtttaagcgcgttaggtttggtcggattcgtagttgaattgattcgtagttgaattttttcgtcggatagaggtcgtaaggttgaggatgagaacgggtttttttgtagggtttcggtttttgatttgggatggggggattcgtagttagttaggaatagaggtttacggggttgttggttgtagttttaatttaagaaggaggagattttttttttgtttttttatttttatcgttttatcgggagcggcgttagtttgcgggattaaattaggggttgggagtttttagattgaaatgcgttttttattattaagagggagtttacgcggtcgcggggggtcgaggtagttagtcggcgtcgcggttttggggagttcgtgtaggggtgtgttttggtgtgaaatttggtaggattttgtttgggtttgtatgtagggaggggttagagattttgaaatgtattagcgggtagggtggtgataaggcgggtaaatgaggttcggggtatgtttttgtttt

SEQ ID NO: 120 - DNA, 3143 bp, Artificial Sequence
  chemically treated genomic DNA (Homo sapiens)
gaagtaagggtatgtttcgagttttatttattcgttttgttattattttgttcgttagtatattttagagtttttaatttttttttgtatgtaagtttaggtagagttttgttaggttttatattagagtatatttttgtacggattttttaggatcgcggcgtcggttggttgtttcggtttttcgcggtcgcgtgagtttttttttggtggtggagggcgtattttaatttggaaatttttagtttttaatttggtttcgtagattgacgtcgttttcggtggggcggtgggggtaggagggtaaaggggaggtttttttttttttggattgaggttgtaattaatagtttcgtgagtttttatttttggttgattgcgaatttttttattttaggttaggggtcgggattttatagaaagattcgtttttatttttaattttgcggtttttgttcggcggggaagtttagttgcgggttagtttagttgcgggttcggttaagtttggcgcgtttaggtattttagtttttggttcgcggtcgggcgaggacggagggggaggggaaggggttgttgtttttttttttaaattcggtttttaatcgttttatttttcgtcgtttattcgttttgtataggtagttaaaatagagttagcggttaattgacggggacgggaagtaaagtcgtttagcgtttcgttttttttagtcggtttttcgggttttttttttcggcgttcggattttggttttttttttttttttttatttttttttttgttttaatttcgtttttatttttcgtttattttttttcgtattcgggttcgttaatttttttttttaagttttttttttagttcggtttttttttcgggttcgttttttttttttttaattttcgttttttttttttttttcgtttttttttttttttttttttttttttttatttaattttggtttttttcgttttttagtttcgattttttttttattttgttttcgtttattttgcgtcggttttttagttcgggttgagttttacgtgtggacggtcgcgtttttattgatagtcgtcgttcgtcggttcgtttcgcgtttcgtcgggtttttaaaattttcgcgtcgcgttttttatcgtcgtattttttttagcgtttagtttttcgtttttttttttgttggtcgtacgtttcggtttcgcgtattttcgttcggtttcgtagtcgttattcgcgtttcgttgttttgtgggatttcgagcgagttcggagggaatttttttttttttttgggggcgatttttgtttgtttgtttgtttttttttggtgatttttgtagttttttaatattcgttttcggagcgtacgggaattcgtcgagttttgcgtgtaggttttttttttttttgaggtttatattttttgaaattttacgttagggtttttgtaattttttttttcgttcgttgacggttttggagtcgttcggggttttaggtcggttatgtaacgtgtatcgttcggggttgtcggttgtattttcgtcgcgtttcgtcgtttattgcgttagattcggcgtttcgcgtttcgtttcgcgggtagttagggggtcggcgttttgtcgaggtttttagttagagtagggagttcgagttcgagggagttttcggagtcgacgaagggtttattagattttgatttttttttgaggcgcgtagattttgtttttgattatttttttttcgcgggtttacggtcgcgcgttttcggcgtcggcgatggggagaagacggaggttgtgtttttagttttattttttgtggttgggttgtgtggtgttttgggcgtagggtacggtcggttagttttagtttttttcgtttaagtcgtttcggttttagtcgtcgtcgtaataggttcggttcgttatagtaggttttgaaggcgggtttttagcgttcgagtatcgcgaggagggtgtcgtagtggttagtcgcgttcgtcggcgaggatagtaggacgtgtttcgagggtaagtgggtaagcggtttcgtatttagggtttcggtttgggggaggggggaatttttagtttggcggttttttggtttatttcgttttagattttttagttggagtttagagttgtagttttttttgttagaatatttaaagatttttaggagcgcgtttttttttttttttttaatttcgtagtttagcgggcggaaagtttttttttcgggggttgggcggcgggtggttagggggtttaggggtgtcgatcgtagagcgtgtgtagagttcgcgttgcgggaataggttttgaatgttcggcggtaggcgggtttgggttcgtttgttgtaggggttagagaagtttgtttgttttttacgtcggggtcgtcgttcgtgagttttttgtttgaggacgtgtgtagggtttatagtttatttttttatcgttaattcgagcgttttattttgcgacgcgttttttttgatacgtcggggttaaagtaatagttgattaaggaggaatggatttgggaaggagggtaaggattttttggaacggaatggtttttttgttttttgtatttggaagttagaatagtagtaaattatatgtttttatgttttttttcgttttttaaaaaggtaggtaagggacgatagatgaaaggtagtgtttagatatttttgatttttttgtattttagtatttagtttttttgtttttacgtttgtttttcgatttttaataatttgaagtgtaattttgatttgtttgttgttttgaaatttattcgttcggggtattgtttacgaagatcgtttatatgttgttgtatttttttatttatttgttacgtgatcgcgtttgtttattataggtttaacgtgtgcggttttagattttatttttattgttgttttggatggaagacgttttttggaggaaattagtgtattgttcgtgagtgtttggtagggatcgtagtttggggtagcgtattcggttttattttcggtcgattttttgtatttagttatttggacgtatagttgcgtttaaaattaagtgattatattgtattgataatcgggacgcggttttatttgaatag

SEQ ID NO: 121 - DNA, 6676 bp, Artificial Sequence
  chemically treated genomic DNA (Homo sapiens)
gattaaacgaaatatcgtaatataaggcgaggtaggtttgtgggaatcggtttttagcgggcggcggtagagcggggaggattggaggggttagggttgggggtggtacgggtttttgggtcgttgggtttttttgggcgggtttagggttggaaggcgttgttagttgtagttaggtttatattttttaatttgttgttttttttttattttatgcgtcggttttggaattagattttgatttggcgttcggataggtagagtgcgtgggcgatttcgatgcgtcgtcgtcgggttaggtagcggttgaagtggaattttttttttagttttagggtttggtagcgggtatacgcggttcgggtttttttttcgttcggttcggttatatttggagtagatagaggaaagtcgtaaggtaatattatttcggttaagggagggggtattgggtgggagggggcgggggagtaggatttaggcgtttcggtatttagtttattatagttttaattttttttattttagatgtttatatttaagttcgatttttgtatttttttttattgtattttttatttttgtaggtagttagtgcgttcggttttgttttttgttcgtttttagtgttttatttttggttgggtttaggcggtcgttcgtttcgggagggaggagagcggttgtatttttgtttcggaaagttttttttattgtttattttttttttgttagcgatagttttaaaattttaggggtaagtaggatttttttttatattatatgaattttattttttattttaaagttggtttagttgcgttaataaaaatttaagtcgaagttggaaataaattattaaaaatattttttttttaatagagagattttttttggttttgtttacgaagttatgaggttttttttagatattttttttttttagaaaaatgaatttatatttagggtaaagttaagttttttttgttttttcgattttattttaaaacgtagagaaggaaagtcgagaagataaaaaagagagagagaattattatggttgatgtgaagtttttttatttaggggaatatttgcggagtttgtttttcgggcgcggttgtggaggtggttatgggttttggttgcgttcgagttaggttggggttgtttagttggtttgtcgtttttttaggtttcgaggacgcgttggtttcgtttatttcggtgaaattggcgttggagttggttgaggtcgtttggtcggagggggacgaagtagagggtttggcgtcgtggttgtcgtcgttggtgtagggtagggattcgggcgaggatagggagtagttcgaagtcgtttgtttgaagcggggtttttgggcgggcgcggggaaggcgcgcgagttttcgtttatcgttttaaagtggttggaggaggtcgaggagcggttgacgttgaggtttattttattgtaattgtagtcgtaagagtcggtgtgtatggtagcgggatttttgtaagagtcgtttagagagttgttattgttataatttagtaattgatagttcgggttatttggataacgtttcgagaaggagtttataaagtacgagtttatttgggtgattttggagggtttgatttgtggatcgtggtcgttataattttgtgttttacgatttatgatgtattaatgaattatagcgatgtattgtatttcgttttgttatgtatgcggttaaatatggggggggggttggaaggggggtggggggcgttagggaattacgtgtttttgttgattagtcgtaaattttcgttgatgattttaagaggtaatttatgttttatggttataaataatgacgattcgagaatcgttagggtcgatttaatgcgagttttcgagagagggggaaaaaaggagaagggggagaaatagagagaaggttggttttggtttttgagtagagcgcgttatttttcggcgatcgacgggagcgcgggcgtgagatcgttatggcggcgggcggttgtttttttgttggttttttgtaggttttttgtagtcgtcgggagagaaagaaattcggttaaggtttagttatagggttgagttttttagagtaggggttgggttttttatttatttttttgtgggtggggttagtttttttatttggttttttttttttatattattattgtcgttattattttaattttggatgagaagattaaagatagagttgttttttttttttttgggttttgtaagttttcgaattggaggcggaaatgggggaagggttggaagttgtgtgtgaaaaataattattgtaacgggttttttttaggagtttagttcggtttgtattttggtggaattgttgttatcggtttatagcgtttaggtcgagtcggtagggttgggcgggaggtttgaaaaagaaggagaagcgtttattttttttgggttatttggaagttcgaaattttttttcggatttttttggtggtttttagtttaggcgtggggagtgatagagtaggatagggattttagaaatcgagtatagttggggttaagcggtttagttgtcgaaaagattgtagcggttatcgcgtttgttgtttagtttgagtagtaatatgtgtttgagagtttgtaaagcgggatttttttttttttttttcggttattgtattcggaggttttattataggttttttattcgtagttaggtagtttgagaatttgtttggtggtagtcgttttttcggaaaaggggttttaaggattcgtatgttttgttgagtacgttgggcggttagagatcgtcgtagttggttttttattaggaggggattattttttttaaaaataagaaaggaagcgagagggcggaggaataaaggaaaatagtgatcgtagtttgttttttgggtgtcggtgtaagtagagagagaatgagttattttgggttgagaggatgatattaaaagttttattatttggttttttgttttggggtttttaaggagtaagggaaagttgtggttttcggtttgtgtttggttggtggttttatatttttttatttgaggttgattttttatttgaggttgatttgttatttgaggtgggaaggggtatttggagtttttagttgtagggtgagagatatttagtggttttattttttagtttttagagttataggttaggagcggagggttaaggttggcgaaaaaatttggttatgtggacgggttaaagattaggggtcgttgcgaaggtgaggatagaaaagcgttgtagaggtttttagattatggtttcgttttcgttagagagttttaggggttttagtggtttttttagtgttgtgtatatacgaggaaaggttagagaatgagagggatatagtatttttttattttttaagtttgtacggggagaagcggttgtgagttttagtattagggaaacgtagcgttggggtttgggtaggattgatcgttttagtttttattttagttgtaattttttagtcgaatagggttcgtttcggcgggttagggttttcgtttttgttgaagaattttggtttaggaaagatggagaggttgggggttgaggagagaggaaaaaatggtaggggaggattggaggtgatcgagcgtcgagtttttatatttttattattgttgttgttgttgttattattattattattattattattattattattattattatcgaagtattttacgtttagagttaagataagattataaatataatatatagaaaattaataaaatagaattttgtttttttttgaggtttttttttttatttttaggtagtatgtgttttttttagtggttttggggagggggtgggagagacgataggtttgggattagggagtttttaaggttttcgttgaggggatagcgaatttattattgaatcgtgtacgggggatatggataaaatgagacgcgatagggataagagtattttgttttgtttttaggaaatattaagtgagttcgttttttagtttttattaggaagtttgattaggttgaggcgagtttttcgggaaggaagggcgcgcgggatgttgggtgggttcgagtagtgaggttttagagtattcgtcgggagttgtgcgggcgggggcgtttaggagagcgttgggtttcgtttgtttgcgtcggagagtaggttttttggtttttttattcgagagttttttttttcgggtttttttgacgttttcggttttttataggttttttttttcgcgttttttttttttttttagtatttttattcggtttgtttttttttttttttttcggtattgagttgagacgcgttgagtagtttgtttttttttttttattttatgcgtcggttttggaattatattttgatttgttttttcgttaggtatagggcgtgcgcgatttcgatgcgtcgtcgtcgcgttaggtagcgattgtagtgaaattttttttttagttttagcgtttggtaacgtgtgtatgtttggcggtttcgtcggtcgttgggtttaaaggaggaatttgttacgtagagtggagatgttgaggtttgcggttatcgggtttaggatttttttttttagtcgattttcgaatatagattttagttagtatcgggatgttttttattttgtcggtttttttttttcgtttcgtatttttttagcgttttttttagatttttttttagttttttaggtttgtgtcgtttgtttagattttagatgggggaggggaggagtagtttgaatttttatttgagtttggggggaggggttggttaggtgtgtttttttttagttgtattttgtttttttttttttttttatttattttgtttttatttttcgttatttttttaatttaatgataaatttaggtcgttaattcgtaatgacgtagatcgatttatagtttatattaacggttttttattttcgagttcggttaatggatattagttgggatttaaggttaataaataatttaatttgagatttcgcgtttgtttttttttttttcgtttcgtttgtttttttttttttttttttttttatttttttttttttttttgattattattttttttttggtgttttattttgttttagttttttatttatagggaaatatagttttagatagatttaattttttttttttagcgttattttttatttttttgtatgacgtatttcgtttttaatggagtcgtttttggttggggaattttattagggttgggagaggggggttgggggtttaaagtaaagttaagttagtgattgtaggtttttgtttttttttttgttttggaatttcggttttggttaggcgttttaggagagtatatttgttttttatggtttttagtgcggttgggattttgtaaattttgtaatttttgtttaataggggatatagcgagagattttcggtcggcgtttaatttttttttattttttaattgagatgtttatttagtattttgtgggagattggggtagggggcgtttattagttttgtgtttcggggtgggcgtttaggggagtcggggcgacggcgacgggaagttttatttattgttgtacgaatttattcgttgtatttacgggtagatcggagtggagtatttttgtttttttgtttcgtcgaatacgtttttgttttgcgcgtagttcgattttcgcggttcggggtggaacgggggttgttcgtcggcgtcggagagtgcgtaggtcgattttttttcgcggtagaaggtcggcgtcggttcgtagtcgtagggcgtcgttcggtcgtagttatcgttcgtcggcgggtaataggaggaagtggtaaagtttttgttttggttcggttttggttcgtagggcgcggggtaatgttttagcgggttcgtatagttcgacgaatagagcggtagttggtttaggaaggatttttgttcgttggttagagtgacggggaaggtggagtttacgaaataggaatttattgggaggggaggcgcgcgcggtcgttgttgtttcgtcgggtttatgatttgttgtgttttatagttcgagcgtcgcgtttattagtagtatattcgagattgggttttagttgaggggggatggcgaggtgttagtgagggttagaaggaaatataattatttgatttaatattgattaatggtagaggtaggaattgttaaatagtatttaggaggagcgtagttcgtacgagggattcgcgtataaatttattaattttttttttttttttttttttttttcgttttttttttttttttttttaataatataacgcgttttgttttatttacgtaggatttgtgaaataggtttagtgtttttgagggaggagggaacgtttagattgagattattttattttcgggtgattaaataaatatgttttttttttattttacgtaggattggaaaaagttaattgtgtttttagaaaagttaatttttgcgttgtttcgatttttttttttcggggagggttgggtaaatgttttcgaatcgttttgagagagaattaaagaaggtttgtttttagggttttgtgtcggta

SEQ ID NO: 122 - DNA, 6676 bp, Artificial Sequence
  chemically treated genomic DNA (Homo sapiens)
tatcgatataaaattttagaaataaattttttttagtttttttttaaggcgattcggagatatttatttaatttttttcggagagaaggggtcgaagtaacgtaggggttaatttttttgaaaatataattaattttttttaattttgcgtggggtgggggagagatatatttatttaattattcgggagtggggtggttttaatttaaacgttttttttttttttaaaggtattgagtttgttttatagattttacgtaggtggaataggacgcgttgtgttgttggggggagagaggagaaaggcgaaggagaaggaggaaaaaaaaaaaggttgataggtttgtgcgcgggtttttcgtgcgggttgcgttttttttgggtgttatttgataatttttgtttttgttattggttagtgttggattagatggttgtatttttttttggtttttattggtatttcgttatttttttttagttaaaatttaatttcggatatattattaataggcgcggcgttcggattataaaatataataaattataaattcggcggagtagtagcggtcgcgcgcgtttttttttttaatgagtttttatttcgtgaattttatttttttcgttattttggttagcgggtaggagttttttttgggttagttatcgttttattcgtcgggttatgcggattcgttgagatattatttcgcgttttacgggttagggtcgggttaggataagggttttgttatttttttttattattcgtcggcgggcggtggttacggtcgagcggcgttttgcgattacgggtcggcgtcggttttttatcgcgagaaagagtcggtttgcgtatttttcggcgtcgacgagtagttttcgttttatttcgagtcgcggaagtcggattgcgcgtaggataagagcgtgttcggcgagatagaagagtagaagtgttttatttcggtttattcgtggatgtagcggatgaattcgtgtaatagtgagtgagatttttcgtcgtcgtcgtttcggtttttttgggcgtttatttcgggatatagaattagtgagcgttttttgttttaattttttatagggtgttgggtgggtattttagttaggagatagaagaagattgggcgtcggtcgggggtttttcgttgtgttttttattaggtaggagttataaagtttgtaaagttttagtcgtattgggagttatggggagtaagtgtgtttttttggggcgtttggttagagtcggggttttaggatagggaagggagtaggagtttgtagttattggtttggttttattttgagtttttaattttttttttttagttttggtagggttttttaattaaagacggttttattaaaaacggagtgcgttatgtaagggggtagggggtgacgttgaagagaaagagttgagtttgtttgggattgtgtttttttgtgggtggggagttggggtaagatgaggtattaggaaaggggtggtagttagaggagggaggaggaataaggggaaggaagagagagggagtaggcggagcgagagagggagaaataggcgcggggttttaggttggattatttgttggttttaagttttaattgatgtttattagtcggattcgaaagtgaggagtcgttaatgtggattatggatcgatttacgttattacggattaacggtttggatttattattgggttggggggatgacggggggtgggaataagatggatggaaagggagggaaagataagatgtaattaggaagagatatatttgattagtttttttttttaggtttaggtgggagtttaaattgtttttttttttttttatttagagtttagatagacggtataggtttaggagattaggagggaatttggagggggcgttggaggagtgcgaaacgggggaagggagtcggtagaatagagggtatttcggtattggttggagtttgtgttcgagggtcgattaggggagggggttttgggttcggtgatcgtaggttttagtatttttattttgcgtaataggttttttttttgggtttagcggtcggcgaggtcgttagatatatatacgttattagacgttggagttggagaaggagttttattataatcgttatttgacgcggcggcggcgtatcgagatcgcgtacgttttgtgtttgacggagaggtagattaagatatggttttagaatcgacgtatgaagtggaaaaaggagagtaaattgtttagcgcgttttagtttagtgtcgaggaggaggaagaaaaataggtcgagtgaaggtgttggaaagggagggaggacgcgaggggaaaggtttgtggggagtcgagggcgttagagagattcgggaaggaaggttttcgggtgggggagttaggagatttgtttttcggcgtagataggcggggtttagcgtttttttggacgttttcgttcgtatagttttcggcgggtgttttgaggttttattattcgagtttatttagtatttcgcgcgtttttttttttcgaggaattcgttttagtttgattaggttttttggtgagaattgaggagcggatttatttgatgttttttggaagtagagtaaaatgtttttgtttttgtcgcgttttattttgtttatgtttttcgtgtacggtttaatggtagattcgttgtttttttagcgggggttttgaagattttttgattttagatttgtcgttttttttattttttttttaaagttattggaaggagtatatattatttagaagtaagaagaggagttttagaagaaaataaagttttattttattaattttttatgtgttgtgtttgtagttttgttttagttttggacgtgaaatatttcgatgatgatgatgatgatgatgatgataataataataataataataataataataataataataaagatgtgaaaattcgacgttcggttatttttaatttttttttgttatttttttttttttttttaatttttagtttttttattttttttgagttagaattttttagtaaaggcgagagttttggttcgtcgaagcgagttttgttcgattgggaagttatagttgagataaaggttggagcgattagttttgtttaggttttagcgttgcgtttttttggtgttgaggtttatagtcgttttttttcgtgtagatttgggggatggagaggtgttgtgttttttttattttttagttttttttcgtgtatatatagtattaagggagttattgaggtttttaaagttttttggcggagacggagttatagtttgggggtttttgtagcgtttttttgtttttattttcgtagcgatttttggtttttggttcgtttatatggttaggttttttcgttagttttggtttttcgtttttggtttgtggttttggagattgaaaaatggggttattgggtattttttattttgtagttgaaggttttaggtgtttttttttattttaagtagtagattagttttaagtaggagattagttttaagtaggggaatgtaaagttattagttaggtataggtcgaaggttataatttttttttgttttttggagattttagggtaggaggttaggtgatggggtttttagtgttatttttttaatttagaatggtttattttttttttgtttgtatcggtatttagaaggtaagttgcggttattgtttttttttattttttcgttttttcgtttttttttttatttttaaagaaaatagtttttttttaataggagattagttgcggcggtttttggtcgtttagcgtgtttagtaaagtatgcgggtttttggaatttttttttcgggaaggcggttgttattaggtaaatttttaaattgtttagttgcgagtgagggatttgtagtggggttttcgaatgtaatagtcgaggaggaggggaagggatttcgttttataaatttttagatatatgttattatttaaattaagtagtagacgcggtggtcgttgtagttttttcggtaattaggtcgtttagttttagttgtgttcggtttttggggtttttgttttgttttgttattttttacgtttgggttaaggattattaaggaggttcggaaggggatttcgaatttttaagtggtttaggagaagtgaacgttttttttttttttttaagtttttcgtttagttttgtcggttcggtttgggcgttgtggatcggtaatagtagttttattaggatgtaggtcggattaagtttttggggaaaattcgttgtaataattgttttttatatataatttttaattttttttttattttcgtttttaattcggagatttgtaaagtttaagaaagggaaaagtaattttatttttgatttttttatttaaagttaaaataataacgataatgatgatgtagggagaaagaattaaatagagaggttaattttatttataagaaagtgggtaaaaagtttaatttttgttttaaaaggtttaattttgtggttgagttttggtcgggtttttttttttttcggcgattgtagggagtttgtagggagttagtagggaggtagtcgttcgtcgttatggcggttttacgttcgcgttttcgtcggtcgtcgggaggtggcgcgttttgtttagaggttaaagttaattttttttttgttttttttttttttttttttttttttttttttcggaggttcgtattgaatcggttttaacgattttcggatcgttattatttgtaattatagagtatgaattattttttgaggttattagcgagaatttacgattggttaataaaagtacgtgattttttaacgttttttattttttttttaattttttttttatatttggtcgtatatatagtaaaacgaagtatagtgtatcgttataatttattaatatattataaatcgtgaagtatagggttataacgattacgatttataaattaagttttttaaaattatttaaatgagttcgtattttgtaaattttttttcggggcgttatttaaatggttcggattattagttgttaaattatggtagtggtagttttttgagcggtttttatagggatttcgttgttatgtatatcggtttttacggttataattataatgggatggattttagcgttaatcgtttttcggttttttttagttattttggggcggtgggcgagagttcgcgcgtttttttcgcgttcgtttaggagtttcgttttaggtaagcggtttcgagttgttttttgttttcgttcgagtttttgttttgtattaacggcgatagttacggcgttaagttttttgtttcgttttttttcgattaggcgattttagttagttttagcgttaattttatcgaaatagacgaggttagcgcgttttcggagtttgaggaagcggtaagttagttaagtagttttagtttagttcgggcgtagttagagtttatggttatttttatagtcgcgttcgaggggtagatttcgtaaatatttttttggatgaggaagttttatattagttatggtaatttttttttttttttttgttttttcggttttttttttttgcgttttggggtgggatcggggggataaggagagtttggttttattttaaatatagatttatttttttaagggggagaagtatttaagaggggttttatagtttcgtagatagagttaaaaagggtttttttgttaagaggggggtatttttaataatttgtttttagtttcggtttaggtttttattagcgtagttgaattagttttaggataaaggatggggtttatataatgtggggaagggttttgtttatttttgaaattttgagattgtcgttagtaaagaaggggtgaatagtaaaaggagtttttcggggtaaaagtgtaatcgtttttttttttttcggggcgagcggtcgtttgagtttagttaagggtgaggtattaggagcgagtaagagataaagtcgggcgtattggttgtttgtagaagtgggggatgtagtagaaaggggtgtagaaatcgagtttgaatgtgggtatttggagtagagaggattggagttgtggtgagttgggtgtcgggacgtttgggttttgttttttcgtttttttttatttagtgtttttttttttaatcggaataatgttgttttgcggtttttttttatttgttttagatatgatcgggtcggacgggaaaagggttcggatcgcgtatattcgttattagattttggagttggaaaaggagttttattttaatcgttatttgattcggcgacggcgtatcgagatcgtttacgtattttgtttgttcgagcgttagattaagatttggttttagaatcggcgtatgaagtggaagaaggataataaattgaaaagtatgagtttggttatagttggtagcgttttttagttttgagttcgtttagaggagtttagcggtttaagagttcgtgttatttttagttttggtttttttaatttttttcgttttgtcgtcgttcgttggggatcggtttttataagtttgtttcgttttgtgttacgatatttcgtttggtt

SEQ ID NO: 123 - DNA, 11656 bp, Artificial Sequence
  chemically treated genomic DNA (Homo sapiens)
gttatcgtttggtaggggttcgtttttttttttggtgttgtttattcgcgaggtttgagacgcggatcgttatttttttcgggtttagtttggttttaatgtaggttttagagagagggataaaattcggttcgttttttttttttttttaaggcgattattagtgttttgggggtttatagggtttttttagttttgattcgagttttcggttgtagttggtttgggtttgtgggggtttcgcgtagggaagcggaggttttttttttaggtttttatatttttttggtttgttttagtagagttagcggtttttcgagatagttgggtttcgtagtttttagtcgaggtttgtcgttgggagaaagaagaatgaatgaagggcggaaggggcggggaggggcggggcgcgtcgcgttagttcgcggcgtttttaggtcgggtcgtagcggggcgtggtttttagaggcgtggttttgggcgtgggggcggggttttttggtgggggcggggtcgcgtagggtcgttttcgtcgtcggtcgttcgcgtttcgttttcgtgtcgtagtttataggtttcgtttcggttcgttttttcgttcgttttttaagtcgtcgcggcgtcgagtcggttttttcgtcggtgttcgagaggcgttttcggttcggttcggttcggttcgcgtttttcgttttcgttttttcgggtcggcggcggtgggcgagttcgcgggttcggtcgtttttagttttagtttcgtcgggtttcgtttttcgtcgagtgtatgaggttgacgttattttgttgtatttggagggaagaacgtatgggagaggaaggtgcgcgggtcgcggggtgtggggcgagggtttggagggggtgttcggggtagcgtggggtacgggagggggtcgggtttgttaggaggtcgcgtttttgtttttttcgggatgagttcgtttttacgaagttcgtaggtttttttttgtttttttttcgttcgggattttttttttcggttttcggcgagttgtttttttgcgggtttgggggtttttggatttttttttttttttttacgttttttcgcgaaggatttttagatattgtttatttcgcgtcggtttttattcgcgtgttttgtttattattcgggtttcgttttggggttattttttatttagtttcggaagaaagagcggttggggaagtcgtagtttcgggttttagtggtcgtcgggcgtttgttcggttttgtgattttgagttaggcgttgattttttggtttttagtttttttttttgtatatttggaaattgggtagttgttttttcggtgtcggtgattgggggttagatgggtagagcggagataggcgtttaggaagtcggaggtcgtgtattgcgggagttttatttattttttttgttcgtgttttaaattcggtgtttgtttttagttttggttgggagtatgatttattttaattttttttttagtttttttttttttattggggtttaaggcgtagtattgtattgtagttagggtttaaggatttttttagtttaggatagggtttgggggtttttttttggatttttttcgttgatttgttatttagatttatttggttttaaggtagggtttgattttatatttttttttgttattaattttttttaggtttatgaaaatttgattggggtaggggtttatttttttgtagtttttgtttatttaaggtatttgcgtttttatagagggttaggttgttgtggttttgggatttagttatgtgattgggtaagttatgttatttttggggtttagtttttttttttgtatagtggagaggggtaggtttggggtattttttagggtttattagttttaagggtgttaggttttaaggatgattaagtatgtttgtggttggttagaggaggtgttaggtttttttgggataggtgtttgggagtatttaggtttgtagttttttttttttgttaagttagggtatttattgttaaggatttgttagggtcggtatttttaggttttttgtttttgattttttagttggttttagtttaggatgtattaatttagttttgtttagtttttgtttttgaagggtttttttagtatttttttttgggtaggagagggaagaaaggaggttgtgataggaatgttatttattgttttatttttaaagttattgttttttttttttttatttattttgttagatttaatgttatagcgggaggatggatttgattttttttttaagttgatatatagggaaatagggttagagaagtttggtaatttagttagtattttagtaagatttaggttagcgttttttttttttttatttggtatagcgattgttttgtttgggcgttgtatatgtgtagtgtgcgaggattggtgtaggtgtaggtatatgtggggtgggtagggtaagttgggtttgtattagattatattttttgagaatgttttttaattttttttttattttgtaggaagcgagttgttcgtgtgtgtaagttgcggttagaggatttatgatggttagtatttttaggttttgaacgcggattggtacgtagattgttttaggtagggtggggtgtttagggtttgtgttgttttaaataaggtttgttagagaggataggttggttaaggaatgggggaggtcgggatatgttttttggtgtcgttttttattgtgatttcgtggttttaatttattatttatgatatgaggtgttttgattagaaaatttttataggtttttttgttgttattttatttatttatttttttttttttttgagacggagtttcgttttgttatttaggttggagtatagtggtgcgattttggtttattgtaattttttttttttgggtttacgtagtttttttgtgttagtttttggagtagttgggattataggcgtgtattattacgtttagttaatttttgtatttttagtagagacgggttttgttatgttagttaggttggtttgaaatttttgattttaagtgatttttttattttagttttttaaagtgttgggatgatagatataaattatcgtttttggttttattttatttttttttatgtattttttttttttcgaaatggttttgttttgttgtttaggttggagtgtagtggtgttatttcggtttattgtaatttttatttttcgggttaaagtgatttttttattttagtttttcgagtagttgggattataggtatatattataatgtttagttaattttttaaattttgtgtaaagatagggttttattattgagatttaggttggttttgaatttgtgattttaagtaatttttttgttttggttttcgaaagtgttaggtttataggcgtgagttaacgttttggtttttgttgttattttagatttttgagatttaaattttagagaggatgggagagatttttaattgagttagtgtttgtaatttagttttttgttggtatttagatagggggaagagttggaaggaatgttttttttgttttttgggtgtttatgtttttgtagggagggaagataaattaggttttaagggaaattaggttatttttagtgttttttaggttgtttgcgaatatgtataatttagttatattagttttagtgtttagatatatatttataggtaggaagaaagtagggttagggttgtggcggaggataaagagtatatgaggatttgaaggttatttagtaggattattttgagaagttaggagtaggggtttatttgttttgagttagagtagggttagagtaggggttttaaaggatgtgagattttttgggtagaaaagtagagtggaggtggggcgtggtggtttatatttataattttattattttttggggttgaggtgggtagattatttgagtttaggagttcgagataagtttgggtaatatggtaatattttgtttttattgaaaatataaaaaattagtcgggcgtggtggcgtatgtttgtagttttagttatttaagaggttgaggtggtagggttatttgagtttgggaggtggaggttgtagtgagttatgatcgtattattgtattttagtttgggtaatagagcgagatttagttttaatttttaaaaaagaaagaaagaaaaataaatggtgtgggagagaattataggtatagttattaaatagtaaggtttaggggagaaaattttataaaagggtagaaggtgaagtttttgggatgtttagtaggggttaagatatttattattaggattttattttaggtttttgttttggtttattttttggtttttggtttttttgagatagttttgttgtgtcgtttaggttggggagtagtggcgcgatttttttttattgtaattttcgttttttaggtttaagcgatttttttgttttagttttttaagtagttgggattataggtgtgtattattacgttcggttaagttttgtatttttagtagagatagggttttgttatgttggttaggttggtttcgaatttttgattttaagtgatttgttcgttttagttttttaaaatgttggaattataggtatgagttattgtatttggtttcggtttgtttttttgtttttttttttttttttttttatatagggttttgttgtgttatttaggttggcgtgtagtggtgagattatagtttattgtagtttttagttttaattggtttaagcgatttttttgatttagttttttaaagtgttgggattataagtataagttattatgtttagtttgtttttttttttttaggaataacgtttaacgttttttaatatttagtaagggataatttttgttttaagtattttgtatagttagatattagtgttgtttttgttttgttagagagaaaattgggatatagagaggttaatttttttgatgaaagttatatagttagtgagtgaaatgaatatatttagtgtggttgaaaggagatagatagtatgttttgggattttgtattaggtgtttagaaagaggttttcggggggtaagagggtttttaataggtagaggaaattatttgtatagcggtgggatggtgcggattgttgagggaataggaatagtttttttggaaggaatagaataagttgagggatttaataagaaataaagttgagatcgattcgtgaagggttttgaatgttaagataaggagttttagaagttaggatgggggtggtggtttattttcgtaattttagtattttgggaggtcgaggtaggtagattatttgattttaggagtttgagattagtttggttaacgtggtgaaattttcgtttttattaaatatttaaaaattagttaggtatggtggtatatgattgtaatttaagttattcgggaggttaaggaaggagaattatttgaatttgggaggcggaggttgtagtgagttgagattacgttattgtattttagtttgggagatagagcgagattttattttaaaaaaaaaaaaaaaaaaaaatagaagggagtcggtagaaagttagggaggggttggggtgatatgttgttgaagaatgttattttagtgggtcggtggtggtatttaggtagggaagggattgttttagtaatttaagggtttgagtttataggatttgatttgggatagtgattgaggatggagagaattttaggtagaagggatagtttttggtgagtatttgttatattggttattatgtattgagtattttttatgttaatttgttaaatttttattataattttatgagggattgtatgtgtttagtttgtatgggagaaatagagattttatgtaattaagtgtttcgttgaaggttgtaatatttagagttgggattaaaatttttttattttatatcgttatagagtaggaaaggtaggggttggcggtggtatatgtttataattttagttttttgggaggcggaggtaggtggattttttgagtttaggagtttgagattagtgtgggtaatatagtgaaattttgtttttataaaaaaattagttgagtatggtggtggtgtttgtagttttagttatttaagggcgttgatatgggagggttgtttgagtttgggaggtggaggttgtagtgagttatgattatattattgtaagttagtttgggtgatagagtgaaattttattttaaaaaaaagaaagaaaggaagaaagaaaaagataggggtttcggggagggtatgggtattggcgaatggtagggtggaatttgaagttatttggttttttaatttgggtattggggagttggtggtttgttgattttgatggaattgggggttatgttggggaggagatatgtttatttgtgttgagttggaggggatatgggttatttatggtggttgtgttttgtttagagttagttatgggagtttgagtttagttggaggtaggaaagttagaaaaaacggtcgtttcggagttggttttgagatggtgagtgggatttgtgatagggttaagacgaatgaagggaagaattttggggatttttgtgtttgcggtgaggggggagatggagttttgggtgatggagagagggttaggagtagagttatagaagttataggagggaagtcgtgttataggatgggtgtatttggttttggagtggtttgttttaaattatttattaggagaggggtgagtttttaggttagggtagtaaagaggaggtatgtttgtgttgtttttggtgtagtgaaatttaagaaggaagttaggtgtagtggtttacgtttgtaattttagtattttgggaggttaaggtaggtagattatttgaggtcgggagtttgagattagtttggttaatatggtgaaattttatttttattaaaaatataaaaattagtcgggtttgttggtgggcgtttgtaattttagttatttaggaggttgaggtagaagaatcgtttgaattcgagaggtagtgattgtagtgagttaagatcgcgttattgtattttagtttgggtgatagagtaagattttatttcgaaaaaaaaaagttttaatatggggaaagatttattagaagtaagagttatggtttttatttcgtggtttgtgggtgtgatatttttaatagtttttaaagttggtggtttttatcgcgtgatagtgagtagagtagtttagagggggttattgtttatttgggtgtatggttgattatagttaggttggtttttagtgggatgtttaaggtgttagattttgtttagtttttttcgggttttgggtttgaggtattgggttcggtttagattttattttatgtattgagatttttgttttagggttttttatttttttgaaggtgttcgggtaggggtaatgtgataaggttatgaggggtttgtagtttttagttttattggggaggtggttagtgatttttatttttttggtttttttgtatgttttttttagtggaattttttagggtttttgagttagttatttgtaaataattatggcgtgtttattttgtattaggttttttttataataatttagtaagggggtgttatttatttattaaagcgattttttttttgagtttcgttttgtcgtttaggttggagtgcggtggcgtaatttcggtttattgtaagttttgtttttcgggtttatattatttttttgttttagttttttaagtagttgggattataggcgtttattattatattcggttaatttttttttgtttgtttgtatttttagtatagacgaggtttcgttgtgtgagttaggatggtttcgattttttgatttcgtgattcgtttattttagttttttaaagtgttgggattataggcgtgagttatcgtgttcggtaatattaaagcgattttaaggttaaggttggtaatttacgtttgtaattttagtattttgggaggttgaggtaggaggattgtttgaggttaggagtttgagattaatttaggtaatatagtgagattttatttttataaaaaaattagttaggcgtggtggtgcgtatttgtagttttagttatttaggaggttgagatgggaggattatttgaatttaggatgtcgaagttgtagtgagttgtgattacgttattgtattttggtttgggtaatagagcgagatattgttttaaatttttaaaaagcgattttataaatgaggtgtagagtttagttatttgttaaaagttttatagcgcgtgaggagtagaattaggattcgaatcgaggtagtttggttttagagtttatagtgtaattatagtttagttttatattttttagattaatagggtttttgttttttagtgggtaagatatttagtgaataaatgtagtgttaggtattgggggatagtatttttaggaagtgatgtttaagggatagaattgaagggagtagtgtttagaggatgtcgggggtagggtcggtgtatgtgtaaaggttttggggtgggaatgtgtttggtataattgaggattataaagttagcgtgcgggagtgtagttagtggttaggggtgtatagagttttgtgggtttcgtggaaggtgtcgttggttgtatagttttttttttttttttttttttttttttttgagatagagtttcgtttttgttgtttaggttggagtgtagtggcgtgattttagtttattgtaattttcgtttttcgggtttaagcgatttttttgttttagttttttggtagttgggattataggcgtttattattatatttggttaatttttgtgtttttaatagagacggggttttattatgttagttaggttggttttaaatttttgattttaagcgatttgtttattttagttttttaaagtgttggggttataggtatgagttattgcgtataggtagttgtgtatttttgaatgttataatttgagtatttgagagttgtttttgttttttggtttttgtttttgaggaagttttacgttgataggatagatagggttataagtgttgtgatgggggtttgtaggttgttggagggtttagtcgggattagatgttgtttttttttgtagagtgggataattgttgtaggtttatgggatttttggtattagttttgagggttgttatttcggggtttgtttttttttgtgttttgattttttagttttttgtaggttttgtttttcggaaggttatgattaggtttggattggtttaggtttttttttggtttatatattgtttttgcgaggttttttttaggaagttttttgtgtataatttttagggttgtcgtatttttggtagtatttttttggtagttgggtgggttggttttgggtaaggagggttgagtatgttgttggtttgtggggttggagtagcggcgggatgtaatttttttttttttaggggatttttttggcgaagataaattgtttataggaagtcgatttttgtttttttgggggtagtagtggaagaggtagttgtttttgagtttgtttttgtttttagagaagtttgaggtttttagtgtcgttgttagggtcgaggttgaggagtttatagcgtgtgtttaggattgagggttagggacgggttataggttttttgtttggggtttaagtttagatcgttcgttttttattcgtattaaagtttaggtaaagggtgttttagttattttttgttgtaggtttagattaagttttttggtatttacgcggttgtagtttttttttgtgcgttgtagttacgttggttttattttttgtagtttttaattttgagtttttgagggaggatggggaagtagttggtttggttatttttgtttttttttagatttttagagtttttagtgtagttatagaggatgttgttggttttagttttaagaagacgtcgttttttttagagggttaagtaagtgggaatttttttttttatttgttttgggttttaggtagggtttttggtgtaaggtttggggttggaagtcgatttatttaggtttaggttttggggtagaattgaaattttttggttattgtcggttgtagtttgggagtaggttattgttaaagttgtgggtttttttaggatagtttttttatgaggtcggttttttatttgttgtttttttatatttggtggttagggatgtggttttgggtagaacgatgattttttatttttgttattatggaagttatcgttgttttttagtttagttagttatttgggttgtagagtattttttttatgtttttcgggtgtttttttttttttttgttttagtttggttttgttttattttgtttttagggaggggtattttggagtggggttagggtatggttttttttcgagggagtttttttttggttgtttttagggtagttttgtatagttttagtatttggcgtattttttttgatattttttttagggatagttaggtattttgtgtggggtatttaagagagttaggttcgttagtttttagtttttgttagaatgtaggtttgaggggtgaggggcggggtaggggtagggataggaatttcggcgtgttttttattcgtaaaggtttattgaggtttcgagttttagttattgagttattaagttagtttgggttaggtttgggtgttttgtttgtaatggaggtagagacggggtttcggggtagttttgaggatgttgggtgtatagcgggggtttcgtcggtaggaattatttatgtttttttttgggttaagttttgtggatgtttagtttggggtcgcggggagttggtaggttagtggtagatattggtgggtagatttagtgtttggtagaataggtattaaggaagtggtgatcggagggaagttaagtgtatttaaattttcgggtgagttattatcgtcgggttttttatagttgttgaaagtgagtaatagtgatgaaggtttgtgagtttttgcgtgagcgagtgaatggattagtagtagtttttaggttgtggaagagcgtttttttttcgggatggggatatttggttatagtaatttttaattttttatttatttatcgtttattgtagaggtatgcgggggttttgttttttgtaggtaggagtgaggggtatttttgtgatgtggtatttttgtgatcgaggttatgtgtgatcggtgtaagggtaggaagcgagttattggtttgtattaggcgtgggggtttttgcgagggtaggatttaaagtcggtttggtttttcggttgtagtatttttttttttttcgaattaggttagagttttgggacgggaggtgttttgtagattattttttttattaattttcgtttttcgttttattttcgcggtgattcggtgaattgtcggttttttgttgtgtatcgagtggggtagtgattttgacgtggcgttttttgtcgtttttgttatcgttattattttcggtggtttagttttcgtatt

SEQ ID NO: 124 - DNA, 11656 bp, Artificial Sequence
  chemically treated genomic DNA (Homo sapiens)
aatgcggaggttgggttatcggaggtggtggcggtggtaggggcggtaggagacgttacgttagggttattgttttattcggtgtatagtagggggtcggtagtttatcggattatcgcgggggtggggcggaggacggaagttggtgaggggggtggtttatagggtatttttcgttttagggttttaatttaattcgaaagggaaaggagtgttgtagtcgggaggttaggtcgattttgggttttgttttcgtagaagtttttacgtttggtgtagattaatgattcgttttttgtttttatatcgattatatatgatttcggttataggggtgttatattataggagtgttttttatttttgtttgtaggaagtagggttttcgtatatttttgtagtgggcggtgggtgggtgggggattaggaattgttgtaattaagtgtttttatttcggggagggaacgtttttttataatttggaaattgttattggtttatttattcgtttacgtagaaatttataaatttttattattgttgtttatttttagtagttgtgaaagattcggcggtgatgatttattcgagggtttgagtgtatttggttttttttcggttattatttttttgatgtttgttttattagatattaggtttgtttattagtgtttgttattgatttgttagtttttcgcggttttaggttgggtatttataaagtttggtttaggagagagtataagtgatttttgtcggcgaggttttcgttgtgtatttagtatttttagaattgtttcgagatttcgtttttgtttttattgtagatagggtatttaggtttggtttaggttgatttggtggtttagtggttggggttcggggttttagtgaatttttgcggatggagagtacgtcggagtttttgtttttgtttttgtttcgttttttattttttaggtttgtattttggtaggagttagaggttgacgggtttggtttttttgagtgttttatatagagtgtttgattgtttttaagaaggatgttaagggaggtgcgttaggtattgaggttgtgtagagttgttttggggatagttagagaggaattttttcgggggagagttatgttttggttttattttagggtatttttttttgagagtagggtaggataaagttaggttggggtaggagaagggggaggtattcggagggtatgaaaggggtgttttgtagtttaggtggttggttgggttgggagatagcggtggtttttataatgataggagtggagaattatcgttttatttagggttatatttttggttattaggtgtgaagaaatagtaggtggaggatcggttttatggggagattgttttggaaggatttatagttttggtagtggtttgtttttaggttgtagtcgatagtaattaaggagttttagttttgttttagagtttggatttaggtgggtcggtttttagttttaggttttatattaggggttttgtttggagtttaggataagtagggagggggatttttatttatttagttttttggaggaagcggcgtttttttggggttgaagttaatagtattttttgtggttatattgggggttttggaggtttaagggagggtaggggtggttagattagttgtttttttatttttttttaggggtttaggattggaggttgtagagggtggggttagcgtggttgtagcgtataggaggaggttgtagtcgcgtgggtgttaggggatttggtttgagtttgtaataggaagtggttgaagtattttttgtttgggttttggtgcgggtggggagcgagcgatttaggtttggattttaggtagggagtttgtggttcgtttttggtttttagttttgaatatacgttgtaggttttttagtttcggttttggtaacggtattgaaggttttaggtttttttggggatagggataagtttaaaagtagttgttttttttattgttgtttttaagggaatagaggtcgattttttatggatagtttgttttcgttaaaaaggttttttgaagaaagggaggttgtatttcgtcgttgttttaattttataggttagtagtatgtttagttttttttgtttagggttagtttatttagttgttaaggagatgttattagggatgcggtagttttgggggttgtgtataggaggttttttggaggggatttcgtagaggtagtatgtgagttaaagggaagtttggattagtttaagtttggttataatttttcgggaggtagggtttgtaaggggttgggaggttagaatatagaaaggggtaggtttcggagtgataatttttagggttaatattagaggttttatgggtttgtagtaattgttttattttataaagaggggtagtatttggtttcggttgagttttttagtagtttgtaggtttttattatagtatttatgattttgtttgttttattagcgtgggatttttttaagagtaggggttaggggataggagtagtttttagatgtttaggttatgatatttaaagatgtatagttgtttgtgcgtagtggtttatgtttgtaattttagtattttgggaggttgaggtagatagatcgtttgaggttaggagtttgaggttagtttggttaatatggtgaaatttcgtttttattaaaaatataaaaattagttaggtgtggtggtgggcgtttgtagttttagttattaggaagttgaggtaggagaatcgtttgaattcgggaggcggaggttgtagtgagttgagattacgttattgtattttagtttgggtaataaaagcgagattttgttttaaaaaaaaaaaaaaaaaaaaaaaaaaaaagttgtatagttaacggtattttttacggggtttataaggttttatgtatttttggttattgattgtattttcgtacgttggttttgtggtttttagttgtgttaagtatatttttattttaaggtttttgtatatgtatcggttttattttcgatattttttaaatattgttttttttaattttgttttttaaatattattttttgagagtgttgttttttaatatttgatattatatttgtttattgagtgttttgtttattagaaggtagggattttgttggtttgggaggtgtgggattaagttgtggttatattgtaggttttgaagttaggttgtttcggttcgagttttgattttattttttacgcgttgtgagatttttggtaagtgattgaattttgtattttatttgtaaaatcgttttttaaaaatttgagatagtgtttcgttttgttgtttaggttagagtgtagtggcgtgattatagtttattgtagtttcgatattttgggtttaaatgatttttttattttagttttttgagtagttgggattataggtacgtattattacgtttggttaatttttttgtagagatggagttttattatgttgtttaggttgattttaaatttttggttttaagtagtttttttgttttagttttttaaagtgttgggattataggcgtgagttattagttttggttttaaaatcgttttaatattgtcgggtacggtggtttacgtttgtaattttagtattttgggaggttgaggtgggcggattacgaggttaggagatcgagattattttggtttatatagcgaaatttcgtttgtattaaaaatataaataaataaaaaaaaattagtcgggtgtggtggtgggcgtttgtagttttagttatttgggaggttgaggtaggagaatggtgtgaattcgggaggtagagtttgtagtaagtcgagattgcgttatcgtattttagtttgggcgatagagcgagatttaaaaaaaaaatcgttttaataaataaatagtatttttttattgggttgttgtgagaggggtttaatgtagagtgggtacgttataattatttgtaagtgattgatttagggattttaggaagttttattgggaggggtatgtagaggggttaggaaagtggaaattattggttatttttttagtggggttggaggttgtagattttttatggttttattatattgtttttgttcgaatatttttagaggggtgaggggttttggaataaaggttttagtgtatgaaatgaggtttgggtcgggtttaatgttttaagtttagggttcgagggagattaagtagagtttagtattttgggtattttattgagagttagtttggttgtggttagttatgtatttaggtgagtagtgattttttttgagttgttttgtttattgttacgcggtgaggattattagttttggggattgttgggagtattatatttataagttacgaggtagaagttatggtttttatttttagtggatttttttttatattgagatttttttttttcgagatggagttttgttttgttatttaggttagagtgtagtggcgcgattttgatttattgtaattattgtttttcgggtttaagcgatttttttgttttagttttttgagtagttgggattataggcgtttattaataggttcggttaatttttgtatttttagtagagatggggttttattatgttggttagattggttttaaattttcgattttaggtgatttgtttgttttggttttttaaagtgttgggattataggcgtgagttattgtatttggttttttttttgagttttattatattagggatagtataaatatgttttttttttattgttttgatttggggatttattttttttttggtgagtgatttgggataggttattttaaagttaggtatatttattttgtaatacggttttttttttgtggtttttgtggttttatttttgattttttttttattatttaaggttttatttttttttttatcgtagatataggggtttttaaagtttttttttttattcgttttggttttattataaattttatttattattttagggttagtttcgaggcggtcgttttttttgatttttttatttttaattggatttaggtttttatggttagttttgggtaggatatagttattatggatagtttatgttttttttagtttaatatagatgagtatgttttttttttaatatgatttttaattttattagagttaataaattattaattttttagtgtttaggttagaaaattagatggttttaggttttattttgttattcgttagtgtttatgtttttttcgaagtttttgttttttttttttttttttttttttttttttttgagatgggattttattttgttatttaggttggtttgtagtggtgtgattatagtttattgtaatttttattttttaggtttaagtaatttttttatgttagcgtttttgagtagttgggattataggtattattattatgtttagttaatttttttgtagagataaggttttattatgttgtttatattggttttaaatttttgggtttaagagatttatttgttttcgttttttaaagggttgggattataggtatgtgttatcgttagtttttgttttttttattttgtggcgatgtggagtgagaaggttttagttttagttttagatgttataatttttagcgaggtatttgattgtatggaatttttgttttttttatgtaaattgggtatatatagttttttatagagttatgatgaagatttaataaattagtatgaagagtgtttaatgtatggtagttaatatgataaatatttattaaaaattgttttttttgtttgaaattttttttatttttagttattgttttaggttaggttttatgagtttagatttttgagttattgggatagttttttttttgtttagatattattatcggtttattgggatggtattttttaatagtatgttattttagtttttttttggttttttgtcgatttttttttatttttttttttttttttttttgagatggagtttcgttttgttttttaggttggagtgtagtgacgtgattttagtttattgtagttttcgttttttaggtttaagtgattttttttttttagtttttcgagtagtttggattatagttatgtgttattatgtttggttaatttttgaatatttagtagagacgggggttttattacgttggttaggttggttttaagtttttggggttaagtgatttgtttgtttcggttttttaaagtgttgggattacggggatgagttattatttttattttgatttttgaaattttttattttggtatttaaggttttttacgaatcggttttaattttgttttttgttggattttttagtttattttgttttttttaagggaattgtttttgtttttttagtagttcgtattattttatcgttgtgtagatggttttttttgtttgttgagagtttttttgtttttcgaaggtttttttttgagtatttgatgtagaattttagggtatgttgtttgtttttttttagttatattgagtgtgtttattttatttattggttgtgtgatttttattaagagaattaatttttttgtgttttaattttttttttggtaaaataaagatagtattaatatttaattatgtaaagtatttagaataggggttgttttttattgaatgttagaaaacgttagacgttatttttaaaaaagaaaaaataggttgggtatggtggtttatgtttgtaattttagtattttgggaggttgagttagaaggatcgtttgaattagttggagttggaggttatagtgggttatgattttattattgtacgttagtttgggtgatatagtaagattttgtgtaaaaaaaaagaaaagaagaaataaaaaaataaatcgaggttaggtgtagtggtttatgtttgtaattttagtattttgggaggttgaggcgggtagattatttgaggttaggagttcgagattagtttggttaatatggtaaaattttatttttattgaaaatataaaatttagtcgggcgtggtggtgtatatttgtaattttagttatttgggaggttgaagtaggagaatcgtttgaatttgggaggcggaggttgtagtgaggagggatcgcgttattgttttttagtttgggcgatataataagattgttttaaaaaaattaaaaattaaaaaataaattaaggtagaagtttaaaataaagttttagtggtggatgttttgatttttgttgggtattttagaagttttattttttatttttttatggagtttttttttttgaattttgttgtttggtgattatgtttgtaatttttttttatattatttgttttttttttttttttttttaaaaattgagattgggtttcgttttattgtttaggttagagtgtagtggtgcgattatagtttattgtagtttttattttttaggtttaagtaattttgttattttagttttttgagtagttgggattataggtatgcgttattacgttcggttaattttttgtatttttagtggagatagggtgttgttatattgtttaggtttgtttcgaatttttgaatttaagtgatttgtttattttagttttaaaaagtgatgggattataggtgtgagttattacgttttatttttattttatttttttatttaggaaattttatattttttgagatttttgttttggttttgttttggtttaaggtaggtagatttttgtttttggttttttaggatggttttattgggtgatttttaggtttttatgtattttttatttttcgttataattttgattttattttttttttatttgtgggtgtgtgtttggatattggggttggtgtgattgggttatgtatgttcgtaagtagtttggaagatattgagggtggtttggttttttttaaggtttggtttgttttttttttttgtaagagtatgaatatttagaaggtaggagggatattttttttaatttttttttttgtttgggtgttagtagggggttgaattgtaggtattggtttaattggaggttttttttattttttttaagatttagattttagagatttaggatgataatagaggttaaggcgttagtttacgtttgtaagtttagtattttcggaggttaaggtaggaggattgtttgaggttataagtttaagattagtttgggttttaatagtgagattttgtttttatataaaatttaaaaaattagttgagtattgtggtgtatatttataattttagttattcgggaggttgaagtaggaggattattttagttcgggagatggaggttgtaatgagtcgagatggtattattgtattttagtttgggtaatagagtaagattatttcgaaaaaagaaaaatatataaaagaaaataaaatgaggttaggagcggtggtttatgtttgttattttagtattttgggaggttgaggtgggaagattatttgaggttagaagttttagattagtttggttaatatggtaaaattcgtttttattaaaaatataaaaattagttgggcgtggtggtgtacgtttgtaattttagttattttagaggttgatataggagaattgcgtgagtttaggaggaagaggttgtaatgagttaagatcgtattattgtattttagtttgggtgatagagcgagatttcgttttaaaaagaaaaaaaaatagataaataaaatgataataggaaggtttgtagggattttttagttaaaatattttatgttataaatggtaaattaaggttacgaagttataataggggacggtattaggaggtatatttcggttttttttattttttgattagtttgttttttttggtaggttttgtttagggtaatataggttttgggtattttattttatttgaagtagtttgcgtgttagttcgcgtttagggtttggaggtattggttattatagattttttggtcgtagtttgtatatacgggtaattcgttttttgtagggtgggaagggagttgggaagtatttttaggaagtgtgatttggtgtaggtttagtttgttttgtttattttatatatatttatatttgtattaattttcgtatattgtatatgtgtagcgtttaggtagggtagtcgttgtgttaaataggagaagaaagggcgttggtttgagttttgttgagatattgattaggttgttaagtttttttggttttgtttttttatgtattagtttaggaggaggattaggtttattttttcgttatagtattggatttggtaaggtaaatgaggagaaaggaagtagtggttttagggataaggtagtgggtgatatttttattatagttttttttttttttttttttgtttaggaagaagtattaagagggttttttaaaggtagggattggatagggttggattagtgtattttgggttgaagttagttgggaggttaagggtaggaagtttggaggtgtcggttttaatagatttttggtaatgaatgttttggtttggtaaggggagggggttgtagatttgggtatttttagatatttgttttagggaggtttggtattttttttagttagttataggtatgtttagttatttttggggtttggtatttttggagttggtgggttttggaaaatgttttagatttgtttttttttattgtatagaaggggagattgagttttagagatggtatggtttgtttagttatatagttaggttttaaggttataatagtttgattttttgtgaagacgtaggtattttaggtaggtaggggttataggaaggtgggtttttattttaattaggtttttatgggtttgggaagagttggtggtagggggaggtgtggagttaggttttgttttggggttaggtggatttaagtgataggttagcgaaggagatttaaggaggggtttttagattttgttttaggttgggggagtttttgaattttaattgtagtgtagtattgcgttttgggttttagtgagggagaaggggttaaagaggaggttaggatgagttatgtttttagttaagattgagggtaggtatcgggtttggggtacggatagggagagtggatgaggttttcgtagtatacggttttcggttttttggacgtttattttcgttttatttatttggtttttaattatcgatatcgggggggtaattatttagtttttaaatgtatagaaggggaaattgaggattaggaagttagcgtttggtttaaggttatagagtcgggtaggcgttcggcggttattgggattcggggttgcggtttttttagtcgttttttttttcgagattggataaagggtggttttagggcgaggttcgggtggtggatagagtacgcggatggaggtcgacgcggggtgggtagtgtttgggagtttttcgcggggggacgtgggaggaggaaaaagggtttaggggtttttagattcgtaggagggtagttcgtcgggggtcggggagggggatttcgggcgggagggggatagggaggggtttgcgggtttcgtaaggacgagtttatttcggaggaggtaggggcgcggttttttggtagattcggttttttttcgtgttttacgttgtttcgggtattttttttaggttttcgttttatatttcgcggttcgcgtattttttttttttatacgtttttttttttaggtgtaataaagtagcgttaattttatgtattcgacggggggcggggttcggcggggttggggttgggggcggtcgggttcgcgagttcgtttatcgtcgtcggttcggggaggcgggggcggagggcgcgggtcgggtcgggtcgggtcgggggcgtttttcggatatcggcggggaaatcggttcggcgtcgcggcggtttggggagcgagcggaggggcggatcgaggcggggtttgtgagttgcggtacgggggcggggcgcgggcggtcggcggcgggaacggttttgcgcggtttcgtttttattagaaaatttcgtttttacgtttaaggttacgtttttagaggttacgtttcgttgcggttcggtttgggggcgtcgcgagttggcgcggcgcgtttcgttttttttcgtttttttcgttttttatttattttttttttttttagcgataggtttcggttgggagttgcgaggtttagttgtttcggagggtcgttagttttgttggggtaggttaggaggatgtaggagtttagagaaggggttttcgtttttttgcgcgaggtttttatagatttaaattagttgtagtcgggaattcggattagagttggagaggttttgtggatttttaggatattggtggtcgttttggggaggggagggaggcgggtcgggttttgtttttttttttgaggtttgtattgaggttaggttgggttcggggaaggtgacggttcgcgttttaggtttcgcgaatgagtagtattagagaaaggagcgagtttttgttaggcggtgat

SEQ ID NO: 125 - DNA, 13705 bp, Artificial Sequence
  chemically treated genomic DNA (Homo sapiens)
gacgggaaagggagggcgagggttgggggcggggatcgtatgaaatggaggcgttcgatcgcgaagggggtttttttcgcgcggttacggggaggagtttggggaggttagcgtgggtggtagttttagggaggttgagagtatcgttaggtttggggttgtgacgttgggcggattcggtagggtttggaatttttttttggttggtttgggttggggtggtgggaggggagaggtcggatcgtttttttgtagtttttttttattgagttaagaggggtttcgagggaggacggaggtagggaaggaatagttttggttttatttagtttattcgtagatattttatttatatatagatttgaagttacgtaatatatttcgattttgatatatattttaataaattagacgtattagtttacggttattttaattcgtagatattatttatttagatggatattttaaaatttagaatttttagtttataaagatatattttttatttagaggtatatggtatattttagatacggttaattcgaagatgtaaattttattatatataaatatttagtttatattttaatttaaatatatattttgaatcgtaagttttaaagtataaatatattaagttatataaatttttgatttacgacgttcgggtatatagatgtaatttaatttaagtaatattttagtttattatggacgtttttttttagatatattttaaatttagaagtttagtattttaagtttatagaaacgttttaggataattttgtgttgttatatgtatgtagtggagtagagatatttttgttttagtttgggggtttttttaagtgagtttaggtttttttagataaattattattagattagggagaggagtgaatttattggatgagttattttttttttttatcggtattagtttttacgtatttgagttttcggttgcgggttatggagttggcgtttgggaacgggatttgtttatagggagttagaaagtagtttttagttttagttttgcgttaattcgttgttagattttggaaaagtttagttttttttaggttttttttttttcgggtttttgtagcgtagtagtatcgggaaggtttttttggttgtttacgcggcgggggagtagtgtggagtgtatttttatttaatttttgtttcgtgtagggattttcgtaattttcgttttttattttagcgtatattggaggaggggaattgaaggtaaacgtaggggtcggggtcgtttgttcgcgttttttagagtcgggttttttttttcgtcgtgcgtagtcgcgatcgtacgtatgtgcgtatgtttcgggagagtttgcgcgtggggtttggggagggggcggtttttaggttgagttacgagagttcgggttttcgtggtaggagtcgggggtcggtaagttttagttttgtttttttttcgattttggatttcgtcgtcgattgggttttttattttttttttttagcgatttttattttgtttcgttttttattttgagtagttttttagggaagtcgtcgttattattgaggttttttaggttttcgatgaagttttcgtaggttatgcgtttttcgatgttttaaggaagggaacggaggtttgtgagtttggagggtttttggttttttaggttttgtatgtttggttaggggtttgtttttcggtttttgttcgttcgtttttatttatatggtcgtggagattcgtgttgagtagtatgagcgtataggttagcgtgtgggcgtcgtttaggggagagttgatttttagttttggttgttttttagggattttttttatagttattttttttaattttttattttatttttattttttttggtcggtaattttttattttttgaatttcgttagtaaattttttttataaagagttttttttttagtagattcgttagtaaggattcgtttttggtttttttaagtattgagggttagttgttttaacgtattagttgttttaacgtttttttgtttttaagtttggattacgagaaagtgaatcgtagtatagttttgtagattagtgtagttaaatagaattttttttttagttaagtattggtttgtataggtatgtaaatttttgtttttttataatatatttaattttagtaatatgtttgtttatatgtatagttttatatatatgtagttatgatagcgttgtttgtatatatgtaagtttatatgtttatacgtatgtatatttattttttgttgtatatatatttatgtttttgtatatatatatagggtttagtttattttgttattgtggttagttaaggatatttttgttttcggaattttttattttttgaggatagggttttaggattgtattggaagtatcgttgggagaagtgggttagtacgcgttttcgtttttgggttttatttattaaggttagtttttttagaaatattttggagaaggggtaagagagggttgtttagtaattaggagtttttagtttttgtttttggggtgataggaggttttgagagtatagtagttggggtgggaaggggaggagagaaaggggatgagggtatgtattttgattttttatttattatttttatttaaggtttttttattaggtagttttggtttttggttatgtttagttattttgggaagggtgatgttaggacggtttgtgggggatagaggggtttaaaggaggtattttggggttttaatacgaatttcggagagtgggggttgttttttaaggggttaatatttatttgagagtttggtttagagttatgttcgtgaagataaagaatttgaggtattttttagttattagtttgttgaagttattgttgtgggtagggtagagagataggtagggttttaaggggaagtgtagggggttaggtggggattatttaatgattaggggatattagatggagagttgtttttaggatgtattttttttgtttttatttttagttttagtttagtggttttattttttgtttaggtgtcgggttatatcggtttttttgaagttatttagtcggtatagttttttggttaggcgttgcgtagtttttaggttcgttttttgtttattggataaggtgtttgtgttttttagggttagtcgttttgtgttgtttagttttgagtttgagtcggatattagttggtttaggggtggttcgttgtcggggtagaatattagtttaggttggggtagggtttttaggagttatttagattttttttttgtttttaggtttagaagatggagaaggggagggagtggagggatatggggaaagtattttttttttttttagggaaggagattagattttttttattagtttattttattattattatttttttgtggaagttttgttttaaatttaatttatattcgttttgttgttgtgggagttttggttgtttttttaagtttttaggggtttatatttgttattagatatagattatttgtttttattttggttttatatagaatatagttttttgttttttagattatggataaagttggaatagatgggttattacggaggaattgtggagggttagggaaagatttgagggtagtagggatattggttcgaaggtttttttttttttgttttttagggagaggaatttttttttggtgttttttttttgtttatatagaagtaggttttggagttagggggttaagggtcggggtgtatatttttattttttttttttttttttttttttattttagttgttttattcgtaaagttatttgttagtttagagatagaggtcggaaatttttggttgttaggtaattcggtttttttggttatttttttttgttgttatggtttttatgattgagagggtagttggtagaggggagagtagaaaggttagattgtgaaaggattttttggagttggacgagagatgtttgattaggtaggggtgatatgggagggaggtagtgggagaggttggtggttgtatttttggtgaagtttttaggttgggtgagggtaaggttataagaattttgagtaggttaaagattttgttaagggaagaaagggttttttaggagagtaagaagggtatttttttgggattttttaatgttgaattatgtttttttaagttattggatttgagattaagaggggtgttgtgagggatttttttttatagttaatggtagtagttttttaaataggaaaataggatttgtattttttaattatttttatttaggggttaggaatataaattaatttttatatttaggatttgttttttatagtagttgtttttggagttttgggggttttaagtttgagggataaaaggaattatttatttgttaaggggtgttgtttttagtttaaggttgttttttgagtggtagggattagggggttttttttttggggttagtttggttttggtttttgtttttttttttttttttttttgtgtttaaggattattagtagtagagttggtattagaattcggtttaagaggggtaagtggggcgggagttggtgggtcgggtcggggtgtagggggttggggaggtagtttaaaggtgaagaaggggttttgggttgggttaggtgaggttaaggtttttagcgaggcgaggttggtataggaggtgtttttggttcggtgtgattttaggatggtttcgaatatataattgaaagagttaggtttattagtcgaggggttcgttttaggtagaaagggtataggtgatttgagaggtattcggttttttggtttgtaggggtagggagaatttttgattaggggtttagattatagggttggggtaggattttattgaatttttatattgattttgttaaggggattattattttttttttattggttttagtttattaataaaaaagagtttttagggtagggcgttaagttatttagtgttttttggggtatattagttttattagtttttagtattttattttttttttttttgttaatttttttttttttttttttttcgtgattcgttttttttttgttattttatttttatttttagtaatattttaggagaagatgaggttttaagcgatattggggtgtgagacggaaaggaatgtttttatattttttatttttttattaggatttaggatttagatttatgtttttgtgtttttgggtttgattgtggtttttggttttttattttgttttttgttttgttagaatttttggtttttttgttttttatatttttagtgttttgttaagttttaggtttttgtttagaattttttgttatatatattgtttcgttagttttatatttatttttattttaggttttttgagttcggttttgtttgtgggttagtgcgaaggagtaagtcgttttttttttttattttttttttttatttttttatttatcgggtttttttagaggttttaaatatttcgtcgtttatatttttttttttatttgttttatcgtcgtttttatttttattgttattgtcgaggttgggatgagggttagggagtgggtcgggtcgtggggtaggtgggtaggtagtgtttggtgggtttttagagttgggttgattttcgatggtcgagtcggttttttttcgtttagttagtattttatcgatgttagtttcgcggtagtattttaggggtatcgtgtttaggtttgtttcggagtatttggttgttcgttttatagttattttagagttttgttttgagtttattttaggtggagatgggggggtttgttttgggggtttagtatttgtagtgtgtataggtatttaggttaggaggttatttacgttagttttttgttttaattttgttttaggatttttgtttattgttttatattgataggaagtttttttattgtttagttattattttttttgttatatatttagtttgtttttggtgttagtggagtttattttaaattaagtttttgttaaatggttttgaggagttgggggaagattagtttttttttgttttttttatttatttatttatttattttgagatagggttttattgtgttattgaggttgaagtgtagtggtgtaattataatttattgtagttttgattgtttggatttaagggatttttttatttaatttttttagtagttaggattataggtgtatattattatatttagttaattaaatttttggtagagatttgtttgttgtttaggttggttttggatttttggttttgagtagtttttttgttttggttttttaaaatattggggttattgagttttgttgagttttttttttattttatggaatgttttttaatatttttttgttttttttttttattatttagttttttttaggtgttttgtttagttttattttttagttttttattatagcgtagatggaaagattgaggtttggggagatattggttgatttaagagttaattttaaggattgggggaagtttgaaggagggttttttattgagttttagttgttgtggggaaggttttgttttgttttttttgttttagttttaggttttatttgagttgggggggtttaaggagttatagaagaatttttatttggttttagcgattttttgggtatgagaggagatttttcggggggaggattaggtatttttttgagttaacgagggagatataggtatttagagataaagttagatatataaggatataagaatatgggatagaaatagaaattaaaatatgtatcgatagagatggaggtttagagatatagagataaatatagagggtaagagagaggtagatttagaatagattaaaggatttagagtgaatagtagataagtttatgtttgataggaggttgagttttgtttttttattgggggtttagggagtttaggggaagttgtatatttggtttaggaatttagtgttagtaggtttttcgaagagtgtggttaggcgtttaggggggttttttagtttattggggagagaggagtaaaggttatttgttttaatttggggtggggttggcggtttatgtataaggtttcggttgttaggtagggtcgagttttttttggcggggagtgggtttgatgtggatgtttttagtcgtaattttcggttggagttaggtttaagggttggggtgggtttgggaggagaaattttatttagattttagtttcgatttaagttttttggagtaggtagtttatttagtggttttatattggttttttttataaagcggaagatgattatagagttttgggtttcgggtgggggttgtttagtgggtgaagagggtgtttagggtgagggagtaatacggggtgagggggggttacgtagaggtgtatagggtgttgttatacgttttagttttcggtttcgaggatttggatttgttattcgtcgtagtaaggagtttgtgttgttatatatgttggttggggggttttggggtatcgggttttcggggagttagcggcgtgggtatcgtggtggggagatggtatagtcgtttttcgagtagaagcgtatggtattttgggttatgttggggtcgggggttaggttgggggggtagggatggcgaggttaggcggggagtaagggggttgtatgttttttagataggtttgtaagagaggaaggggagtatggggtgaattgttaaggagttagatggataggatagtagagatagggaagggaaagttggttagggtttttgagtattagggatttagtatattttggtaatatgggattattgattttacgtttggggattatttttatagaggtttgacgagaaaagatttatatatttagtgggtttttggtttttttttttttgtttgaggttttgagtattattttgggaggagagaggaagtaattttaaagttgagtgagttcggagtttttatggtattttggagttatttttagaataggggaagttggtattttattttttggaaaaggggtgttagttagttgttattattatatagttttgtgatttttatagttttttttatggaggttttttatttagggaagggaaatttaggttttttggaaggagagggaagaggaataggtgttatatagggatgttgaagggttgagaggtatagtatggaagtggggagaaaagtttgagtagaggtttttatttttaatatatatatattgagtgggaaagggatattttttttttttttttttttttttgagatggagtttcgtttttgttgtttaggttggagtggaatggcgttattttagtttattgtaattttcgttttttaagtttaagtgatttttttgttttagatttttgaatagtttggattataggcgtttagtattatgtttggttaatttttgtatttttagtagagatggagttttattatgttgtttaggttagttttaaatttttgattttaggggatttatttattttggttttttaaagtgttgggattataggcgtgagttatcgtattcggttagggatatttttttttttatataggtatagataggtatttatatatatataaatatatatatatatatatatatatatatacgtatatatatatataaggataaatatgttagtatatagttaaatatatttataggtaatattttttggtatatatatagatatatatatatatatattgtttaaagatatatttttatgtatttttatagttataataagtatgtgtgtaatgaaaaggtatatgtttgttttatatatatattattattaaataggaatatataaagaggtatttaaatatatatataagttgttattttttagtgtatatagaggtttaggtgtattagatatttatagagatttattgtttatagttatatatatatatagatgtatatatatagatgtatatatttaagtagggatatatatcgtttttttttttttatttattggggttttttgaggggaatttgtatttatattttttttttttttttttttttttaggggtaagatagatttcgtttaggagagattataattaggtaaaggggtttttggtggtaatgtaggggaggggtagaggttaggagtagtaattttgttaggtaggtttcggaagtttaacggggttttagcgtatattcggtgtagttttaatttaatgttattttagtatttatcgttgttcgtttagagttgagatcgaggagagatagaggagaggttgggtttagttgagttgtgaaggtagcgcggttttcgtttgttttaggttcgttcgttttttagtttttttttttattttttacgcgtcgtttaggtaacgttaattttttttatttttcgtttttttttagggtttagagtttcggaggttgttagttttttttgtcgttaggttttcgttgggttttttcgttaatttaagattcgttttagataaggaggagggcgtatggaatttttggttttattttttagatttttacgtgttttattttatttgtgtttacgtttttttcgtttatcgttttttgagttatacgtaaggttcggttgtatacgcgtgtttcgttttagattttacgcgtgtttttaggaggttgttatatgatttgttatatgttatacgcgttttcgtttttacgagtacgcggtcgcgttaagtatacggtatgggtgtagattggattcgttttttaaatttaggagattattaattatggaaaggagatttagggaatatcgttttgaattcgttaggggttttgagtttcggatttaggagatttaattttgattatttttttaggatgtagtagggggatgttaaattagattttaggaagaatttttttgttgtttgagttaggtgtcgttacgtttgtttaggggtaagaggttagacgggatgaattagggatcggaagacgtgggggatcggtaatttttgtgtttttggttagggtagaagggggttttgttattttaagaaagagtcgttggagttattatggtaattattttttttgggagggttagggcgggtagatggtgatttcggaaggaagaaggggtttgttcgggtagttagggggcgcgaggacgtgcgaggcgggggcgcgcggggtttatcgcggggaggggcggcgcggatttcgcgtggtgttgaaggggatagcgttagatttgtcgtattgcgtaggcgtagaggcgcgaataaagaggggagggggacgaggcgcgcggtcggaggtggtgcgcgtttacgtggttttatttttgtaggggtttgtttttttagttattttttttttaagtaggttgaggaagaagagatagtaagtttttatttaatttgattttttttttgttttttttcgttgttagttttttttttttcgttgttttgcggggtggggaaacgtggaaggaattttgggaaaattagatgtttgggttttttattttcgtttggtttgattttggataaggggttttttttttagggtttcggtttttttatttttaaaatggattgatagtatagatttgtttattttttagaggtgttcgaagttttgacgagataatagatgagaagtggttttcgttgtgatgagttagttgaagcggttgtatcggagcgttagatcgttagcggtgtagtggttttcgcgttttttatatttttttatatttatttcgtggatgatgggggaaggtattatttttggggtttttcgaagcggattttgggattgggatttggggacgcggtgagaggtagttttgaagttgagtttagaggtttggggcgttattgttttagggcggatttagttttagattttataattaaatttaaggttagtcgagaagtattattattggcgggttgagttgagtttttattttttttaggattttggatttttggaggaaatgaaagggatttagttggaaatatagttttttttcgcgttttttatatttttttttttcggcggaaacgcggtttaaattgttacgaagtggaagaggttggatagttttttataattaattaggaatgggaggtttgagtaggtttatttgatgagggaaatattatagtttcgttaatttatttattattttaataattatttattgaatatttgttacgtggtagatagtaagagtttggatagttttttttcgttttttaaagtcgttaaacgcgattagagggtagaggagaggtcggtaatttaagagttttggtttcgtttttttcgcgtttggttttgtttgttttttttattattatttcgtttagaggcggttattggtttaagaggacgatagaagttagtttttgatgtttatcgtattttttagttttaggttttaagttttgtagtcgagaaggcgaggtttaatgttatattatcggtttgtttcgttttcgtttcggggtttattcgaaaagtttttagatcggattttcggtgagacggtattcgattaaataggtttgtttttataggttaaggaggcgggtttggtgcggttattttaaggttaaagcgagaaaattttattgcgtacgcgtaatagatagtcgatggagttatcgatggagtcgttcggaggggagtaagagttcggagtcgttaggtatcgagtatcggaggggtcgagagggaagaggaatttgagggaggggagtcgagtcggggttgggtttgggggtcgtttttgggagttggggcgtaggaatataacggaggcggattcgtaggtaatagtggtttcgggacgttagtgttaacgtttttttattcgtaggtttttggatttgttttgggaagacgtgttgtttttatacgttttgaatcgggtttcgttgcgttagttgtttcggttgtagcgcgttagtcgggtttttcggtcgttggtgtagttttatttggtcgggttgcgtcgtttcgatgtcgcgtaggtgagtcgggggttgaagtttcgtttttgtttgggtatcgtttcgtttttagtttagtttttagtttcgtagtatgtttttttggatttttttgggtcgtcggggttgttcggaagggatttacgtattaaagggtaaatattcggtagcgatttagagggaaagtggggttttttttgggagagtaggaggttgttagaaaagaatttaggttaggggtgtataggcggttgaggagtgcgggacgggttgagagttggggtgttttttcgttcgtaggtgggttcgtagatttcgcgggtcgtattggttcggttgttgcgggatgtcgaggggttgtaggagttggtattggcgtcgtgttacgaatggttgttagacgaggatttggtgtcggtgttggcgcggaattcgtagttgcggagtgtggcgttgggcggttgcgggtaattgagtcgtcgggcgtttggggttttggtcgagggttgtttacgtttgtagcgtttgtcgttcgcgtattgtgattgggtggacgggttggcgttgcgcggtttcgttgatcgttgttcggttttggaggagttggattttatcgtttgtcgttagtttaaggacgaggttatcgtgtatttggcgtagaggcgcggcgttggttttcgtagtttttttttggtcgttaacgttaacgtgggggacgtcgcggtttaagagttggttcggaattgtttagaattttattattttgattttatcggttgttttcgcgtcggaagcgacggtgttaggtgtttgggtttgatagggcgggaggagggtagttatttagtttttgttggtatggggcgggttgtagttgttaaaaggtcggattgagggttttgaatttttttgtaaattatagtatttttattttgaatagaaagggtttttaggattgtttaggttagagagtttatagtttaaaaattttttttaattaatgtttatatattgggagattttatatagaaagtcgatttttggtttttttttaataagggggagattttgtaattttaggcggagttgagggttaggttttttttttaaatgagataggaagtttttagtttattggaagttaatttaggcgttttttttgtgtagggacggaaaaagtatgtttttgtttcgagttggagggagatcgggattttgtcggagttagttcgaggttgagtgagttcgggtttttattttattttattaaaggtgtggtggttttatgtttttagttttattttgttttttttttaggatattggtcgagtattgtttcgtgttgcgttcgttgcgggtgcggtattgttattatgtggcggagtttagtttgagtcgtttgcggaagcgcggcgtggatatcgacgtggagtcgtcgttgtattaggttttggtgttgttgtaggatatggcgggtttcgtattttttgttaatttgtaggtttgattcgtttgttaatcggagt

SEQ ID NO: 126 - DNA, 13705 bp, Artificial Sequence
  chemically treated genomic DNA (Homo sapiens)
gtttcgattggtaggcgggttagatttgtaggttgataaaaggtgcgaagttcgttatattttgtagtagtattagggtttggtgtagcggcggttttacgtcgatgtttacgtcgcgttttcgtaagcggtttaggttggatttcgttatatggtggtagtgtcgtattcgtagcgaacgtagtacggggtagtattcggttaatgttttgagggaggagtagggtgaggttagggatatgaggttattatatttttggtggggtaaggtggaggttcgggtttatttagtttcggattggtttcggtaaaatttcggtttttttttagttcggggtaggggtatatttttttcgtttttatataagggaggcgtttggattggtttttagtgagttggagattttttgttttatttaaggggggaatttggtttttagtttcgtttaggattgtaagattttttttttgttgaagaaaagttagaagtcgattttttatgtgaaattttttaatgtgtaaatattggttgaaaaaagtttttaaattatgggttttttggtttaggtaattttagaggttttttttgtttagaatgggggtgttgtggtttgtaggaagatttagaatttttagttcggttttttaataattatagttcgttttatattagtagaggttaagtgattgtttttttttcgttttattaggtttaggtatttgatatcgtcgttttcgacgcggaggtagtcggtgaggttaaggtggtggagttttgggtagtttcgagttaatttttgaatcgcggcgttttttacgttggcgttgacggttagagagaggttgcggagattagcgtcgcgtttttgcgttaggtatacgatggtttcgtttttgagttggcggtaggcggtgagatttagtttttttagggtcgggtagcgattagcgaggtcgcgtagcgttagttcgtttatttagttatagtgcgcgagcgataggcgttgtaggcgtgggtagttttcggttaaagttttaagcgttcggcgatttagttgttcgtagtcgtttaacgttatatttcgtagttgcggatttcgcgttagtatcggtattaggttttcgtttgatagttattcgtgatacggcgttagtgttagtttttgtagtttttcggtatttcgtagtagtcgggttaatgcggttcgcgggatttgcggatttatttgcgggcggggaggtattttaatttttagttcgtttcgtattttttagtcgtttatgtatttttgatttgagtttttttttggtagttttttgtttttttaggagagattttattttttttttgagtcgttatcgagtatttgttttttggtgcgtggatttttttcgggtagtttcggcggtttaagggggtttagaagggtatattgcggggttgggggttgggttagaggcggggcggtatttaggtaggggcggggttttagttttcggtttatttgcgcggtatcgaagcgacgtagttcggttaggtgaagttgtattagcgatcggaaggttcggttaacgcgttgtagtcggagtagttggcgtagcgggattcggtttaggacgtgtgggagtagtacgtttttttagggtaggtttaggaatttgcgagtaaaggggcgttggtattggcgtttcggggttattattatttgcgagttcgttttcgttatgtttttgcgttttagtttttaagagcggtttttagatttagtttcggttcggttttttttttttaggttttttttttttttcggttttttcggtgttcggtatttgacggtttcgggtttttgttttttttcggacggttttatcggtggttttatcggttgtttattgcgcgtgcgtagtaagattttttcgttttggttttggagtggtcgtattaaattcgtttttttggtttgtagagatagatttatttaatcgagtgtcgttttatcgaggattcgatttgaaagtttttcgggtggatttcgaaacggaggcggaatagatcggtggtgtaatattaggtttcgttttttcggttatagggtttgaggtttgaagttggagaatgcggtgggtattagagattggtttttgtcgtttttttgagttagtagtcgtttttgagcgaagtggtggtgggaggagtaggtaaggttaaacgcggagggggcggagttaggatttttaggttatcggttttttttttgttttttggtcgcgtttagcgattttgaaaaacggggagaaattatttaggtttttattgtttgttacgtagtaggtgtttaataagtaattgttgaaataatgaatgaattggcgaggttataatgttttttttattaagtaaatttgtttaaattttttatttttgattaattatgaagagttatttagttttttttatttcgtaatagtttgggtcgcgttttcgtcgggggagagagatgtagggggcgcgaagaaagattatatttttaattgggttttttttattttttttaaaggtttagagttttaagaagaatgagagtttagtttagttcgttagtggtagtgtttttcggttggttttgggtttagttgtagggtttggggttgggttcgttttgggataatgacgttttagatttttggatttagttttagggttgttttttatcgcgtttttaggttttagttttaggattcgtttcggggaattttaggagtagtgtttttttttattatttacgggatgggtgtggggggatgtgaaggacgcgagagttattgtatcgttgacggtttggcgtttcggtgtaatcgttttagttggtttattataacgaaaattattttttatttgttatttcgttaaggtttcgggtatttttgaaaggtgggtaggtttatgttattagtttattttaaagatggggaaatcgaggttttggagaggaagttttttgtttagaattaagttagacgggaatagagaatttagatatttggtttttttagaattttttttacgtttttttatttcgtaaggtagcgagaagggagaagttagtagcggggagagataagaaaggggttaagttaggtgagggtttgttatttttttttttttagtttgtttagggagggggtagttgggaggatagatttttgtaaagatagagttacgtgagcgcgtattattttcggtcgcgcgtttcgttttttttttttttttgttcgcgtttttgcgtttgcgtagtgcgataaatttggcgttgttttttttagtattacgcggagttcgcgtcgttttttttcgcggtgagtttcgcgcgttttcgtttcgtacgttttcgcgttttttgattgttcgaatagattttttttttttttcgaggttattatttgttcgttttggtttttttaaagagagtagttgttatagtaattttagcggtttttttttaaaatagtagggtttttttttattttggttaagggtataagggttgtcggttttttacgtttttcggtttttagtttatttcgtttaattttttatttttgggtaggcgtgacgatatttaatttaggtagtaaggaagttttttttgaagtttgatttaatatttttttgttgtattttgggagggtggttagggttggattttttgggttcgagatttaaaatttttggcgggtttaagacggtgttttttagattttttttttatagttgatggttttttggatttagggggcgggtttagtttatatttatatcgtgtgtttggcgcggtcgcgtgttcgtgggggcgggagcgcgtgtggtatgtaataggttatgtggtagttttttagggatacgcgtggggtttggagcgggatacgcgtgtgtagtcgggttttacgtgtggtttaaggggcggtgggcgagagagacgtggatataagtggggtggggtacgtgagggtttggggaatagaattaggggttttatgcgtttttttttttgtttggggcgggttttaggttggcgggagagtttagcggggatttagcgataaggggggttggtagttttcggggttttgggttttgggagagggcggggggtgggggggattagcgttgtttgagcggcgcgtagggggtagggggagggattgagaggcgggcgggtttggagtaaacgggagtcgcgttgtttttatagtttagttgggtttagttttttttttgttttttttcggttttagttttgggcgagtagcggtgagtattgaggtggtattgagttggggttgtatcgggtatgcgttgggatttcgttgagttttcggaatttgtttggtagggttgttatttttgatttttgttttttttttgtattgttattagaggtttttttatttggttatggttttttttgggcgggatttgttttatttttggggagagagggagaggagaggaatatgggtgtagattttttttaagagattttagtaggtgggggggaggggacggtgtgtgtttttgtttgagtgtgtatatttgtatgtgtatatttgtatgtgtatgtgattgtgagtagtaggtttttgtgagtgtttgatatatttggatttttgtgtgtattggagaatgatagtttgtgtatatatttgggtatttttttgtgtgtttttgtttgatgatggtgtgtgtgtaaaataagtatgtgtttttttattatatatatatttgttatgattgtgagagtgtatgagggtgtgtttttgagtagtgtgtgtgtgtgtgtgtttgtgtgtgtgttagagggtgttgtttatgaatgtgtttaattgtgtattgatatatttgtttttatgtatgtgtgtgcgtgtgtgtgtgtgtgtgtgtgtgtgtgtgtttgtgtgtgtgtaggtgtttgtttgtatttgtatgaagaaaagaatgtttttggtcgggtgcggtggtttacgtttgtaattttaatattttgggaggttaaagtgggtggattttttgaggttaggagtttgaaattagtttggataatatggtgaaattttatttttattaaaaatataaaaattagttaggtatagtgttgagcgtttgtaatttaagttatttaggagtttgaggtaggagaattatttgaatttgggaggcggaggttgtagtgagttgagatagcgttattttattttagtttgggtagtaggggcgaaattttattttaaaaaaaaaaaaaaaaaagaagaatgttttttttttatttagtatgtatatattgggggtaggagtttttgtttaggtttttttttttatttttatgttgtgttttttagttttttagtatttttatataatatttgttttttttttttttttttttaggaggtttgagttttttttttttgagtgaggggtttttataagagagattataggggttatagggttgtatgatggtgatagttggttgatattttttttttagagggtggggtattaattttttttattttagaagtagttttaaagtgttataagaatttcgggtttatttaattttgaagttgttttttttttttttttagggtgatgtttagggttttaggtagaaggaaaggagttaggggtttattgggtgtataagttttttttcgttaggtttttatggaagtagtttttaggcgtgggattaatgattttatattattagggtgtgttaggtttttgatatttagaggttttagttaatttttttttttttatttttgttgttttatttatttaattttttggtagtttattttatgttttttttttttttttataggtttgtttgaagagtatgtagtttttttatttttcgtttggtttcgttatttttgtttttttagtttgattttcggttttagtatggtttagggtgttatgcgtttttgttcggaaggcgattgtgttatttttttattacgatgtttacgtcgttggtttttcgaaggttcggtgttttagagttttttagttagtatgtatggtagtataggttttttgttacggcgagtggtaggtttaggttttcgaggtcgggaattgggacgtgtgatagtattttgtatatttttgcgtggtttttttttatttcgtgttgtttttttattttgggtattttttttatttattgggtagtttttattcggggtttagagttttgtggttatttttcgttttgtggagaaggttagtgtgaggttattgaatgggttatttgttttagggggtttgagtcggagttgggatttgggtggggtttttttttttaggtttattttagtttttgggtttggttttaatcggaagttacggttggaagtatttatattagatttatttttcgttagaggaggttcggttttatttggtagtcggaattttgtatatgggtcgttagttttattttaggttggagtagatggtttttatttttttttttttaatgggttggggggtttttttgagcgtttggttatatttttcggaggatttgttgatattggatttttgaattaggtatgtaattttttttgggttttttgggtttttagtgaaggggtaaggtttagttttttgttagatatgggtttgtttgttgtttattttgaattttttaatttgttttaaatttgttttttttttgttttttgtgtttgtttttgtgtttttgaatttttatttttgtcgatgtatgttttaatttttgtttttgttttatatttttgtgtttttgtatgtttggttttatttttgggtgtttgtgtttttttcgttggtttagggggatatttggtttttttttcgggaagtttttttttatgtttagagaatcgttagagttaaatgggaatttttttatggttttttggatttttttagtttaggtaaggtttgggattgaggtagggagaatagggtagggttttttttatagtagttgaggtttagtagggagtttttttttaaattttttttaatttttggaattggtttttgagttagttaatgtttttttaggttttaatttttttatttgcgttatgatgggaggttggaggataggattgggtagggtatttggaggaagttgagtaatggagggaggggatagaaggatattgaggggtattttatggagtagaaaagaggtttagtagggtttagtggttttagtattttgggaggttaaggtaggaggattgtttaaagttaggagtttaagattagtttggataataagtaagtttttattaaaaatttaattagttggatgtagtggtgtgtatttatagttttagttattggggaggttgggtgggaggattttttgagtttaggtagttaaggttgtagtgagttatgattgtattattgtattttagttttagtgatatagtgagattttgttttaaaataaataaataaataaataaaaaagatagaaaaaggttggtttttttttagttttttaaagttatttgataagaatttgatttaaaatgagttttattggtattaggaataagttaagtatgtagtaggaggaatggtggttagatagtgaaagaattttttgttaatatgaggtagtgggtagagattttagagtagaattaggatagggagttgacgtggataattttttgatttggatgtttatgtatattataggtgttaagtttttagagtaggtttttttatttttatttggggtgggtttaaggtagggttttggggtggttgtggggcgagtagttaagtatttcgagatagatttggatacggtgtttttgaggtgttatcgcgagattgatatcgatgaggtgttggttgagcgggaggaggtcgattcggttatcgaaagttagtttagttttgagggtttattaggtattgtttatttatttgttttacggttcggtttattttttggtttttattttagtttcggtagtggtaatgaggatgaggacgacgatgaggtaggtggggaagaagatgtggacgacgaggtgtttgaggtttttgaaggggttcggtgagtggggaagtgggagggggaagtgggagagggaagcggtttgttttttcgtattggtttataggtagagtcgggtttaaagggtttgggatagagatgggtgtggggttggcggggtagtgtgtatagtaggagattttagatagaggtttgaggtttggtagaatattggggatgtggggagtaaagaggttaggggttttagtagaatagggggtagggtgagaggttagaggttatagttaagtttaggaatataggagtatgagtttggattttggattttggtgggagagtggggagtgtggggatattttttttcgttttatattttagtgtcgtttggagttttatttttttttaagatgttgttagaaatagaaatgggatggtagaagggaagcggattacggaaaaggaggagaaagggagattagtagggagggaggggatggggtgttggggattggtagggttggtgtgttttagggggtattgaatagtttggcgttttattttagaggtttttttttgttagtgggttggagttagtgaaaaggggatgataatttttttagtagagttagtgtgagagtttagtgaaattttgttttagttttgtgatttgggtttttaattagagattttttttgtttttgtaggttagggagtcggatgttttttaagttatttgtgttttttttatttgggacgagtttttcggttgatgggtttgatttttttagttgtgtgttcgaagttattttggagttatatcgggttaaaggtattttttatattagtttcgtttcgttggaggttttggttttatttggtttaatttagagttttttttttatttttgagttgtttttttaattttttgtatttcggttcgatttattagttttcgttttatttgttttttttgaatcggattttggtattagttttgttgttgatggtttttggatatagagaggggaggaggaggaggtagaggttagagttaagttggttttagggagggagttttttagtttttgttatttagaggatagttttgggttgggggtagtattttttggtaggtaagtaattttttttgttttttagatttgaggtttttagggttttagaaatagttgttgtaagggatagattttgagtgtgaggattggtttatatttttgatttttgagtaggggtggttaagggatgtagattttgtttttttatttggaggattattgttattagttgtgagggagagttttttatagtattttttttggttttaagtttagtggtttgagaaagtatgatttagtattgaaggattttaggagaatattttttttgtttttttggagggttttttttttttttggtagagtttttagtttgtttagaatttttgtgattttatttttatttagtttgaaggttttattaaagatgtagttattagttttttttattgttttttttttatgttatttttgtttaattaggtatttttcgtttagttttaggaagtttttttatagtttaatttttttgtttttttttttgttagttatttttttagttatggaagttatggtaataggagggggtggttagggagatcgggttgtttagtaattaggagttttcggtttttgtttttgggttgataggtggttttgcgagtagagtagttggggtgggaaggggaggaaagaaagggaatgagggtatgtatttcgatttttaattttttaattttagagtttgtttttgtgtgggtagagggggagtattaaggagaggtttttttttttaaaaagtaggagggggaaagttttcggattagtatttttgttgtttttaaatttttttttggttttttatagttttttcgtggtagtttatttattttagttttgtttatagtttaagagataaaggattatgttttgtgtagggttagggtgggaatagataatttatgtttaatagtaaatgtaggtttttgggagtttgaggaagtagttagaatttttatagtagtaagacggatgtgggttagatttgaggtaggatttttatagagaggtggtaatgatggagtaggttgatggagagaatttaatttttttttttggaaaaaagaagaatgttttttttatgtttttttattttttttttttttttattttttgggtttggaggtagaaggagggtttggatggtttttaaggattttgttttagtttgagttggtgttttatttcggtagcgaattatttttgagttagttggtgttcgatttagatttagagttggatagtatagagcggttggttttgggaagtatagatattttgtttaatgggtagaaagcggatttggaggttgcgtagcgtttggttaagaggttgtatcgattagatggttttaggaaggtcgatgtggttcggtatttgggtaagaagtaaagttattaggttgggattgaggatgggggtagagggaatgtattttgaaggtagttttttatttaatgttttttggttattgggtaatttttatttgattttttgtatttttttttgagattttatttgtttttttgttttgtttatagtaatgattttagtaaattggtggttggggagtattttaagttttttgtttttacgggtatgattttggattaagtttttaggtgggtgttgattttttggaggatagtttttatttttcggggttcgtgttagggttttaggatgttttttttgagtttttttgttttttataagtcgttttgatattattttttttaagatggttgggtatggttaagggttagagttgtttggtaaagggattttgggtaggggtgatgggtggagggttagggtgtatatttttattttttttttttttttttttttttattttagttgttgtatttttaaagttttttgttattttagagatagaggttggaaatttttggttgttaggtaatttttttttgttttttttttagggtgtttttgaaggagttggttttaatgggtgagatttaggaacgagagcgcgtgttggtttattttttttagcgatatttttagtgtaattttgaagttttgtttttagagggtgaggagtttcgagagtaggggtgtttttagttggttatagtggtaaaatgggttgggttttgtgtgtgtgtataggagtatgagtgtgtgtatagtagggaatggatgtatatgcgtgtaggtatgtgaatttgtatgtgtgtagatagcgttgttatggttgtatgtatgtggaattatatatgtgggtaggtatattgttagggttgagtgtgttgtgaagaggtaggagtttgtatgtttgtgtaggttagtgtttggttggagaggggattttgtttggttgtattggtttataggattgtgttgcggtttattttttcgtggtttaggtttagaggtaagggaacgttggggtaattagtacgttggggtaattagtttttagtatttgagggagttagggacgggtttttgttgacggatttgttggaagaggagttttttgtggggagggtttattagcggggtttaggaggtaggaagttgtcggttaaagggggtggggatgaaatgggaggttggggaagatggttgtgggaagggtttttgggaggtagttaaggttgaaagttagtttttttttagacggcgtttatacgttgatttgtgcgtttatgttgtttaatacggatttttacggttatgtgagtggaggcgggcgggtaggagtcggaaaataaatttttggttagatatgtaggatttgggaggttaagggttttttaaatttataggttttcgtttttttttttagaatatcgggaagcgtatgatttgcggggattttatcgggaatttggagggttttaatgatggcggcgatttttttagggagttgtttaaggtggggggcggggtagggtagaagtcgttggaggggaaggatggaggatttagtcggcgacggagtttagagtcggagggagggtagggttggggtttgtcgattttcggtttttgttacggaagttcgggttttcgtgatttagtttggggatcgttttttttttaggttttacgcgtaggttttttcggaatatgcgtatatgcgtgcggtcgcgattgcgtacggcgggggaggggattcggttttggaaaacgcgagtaggcggtttcggtttttgcgtttgtttttagttttttttttttagtgtgcgttggggtggaaggcgggagttgcgggggtttttgtacgggatagggattggatgggggtatattttatattgttttttcgtcgcgtggatagttaaaaagattttttcggtgttgttgcgttgtaggaattcggagggagaggggtttgagagggattaagtttttttaaggtttggtagcgagttagcgtaaagttggagttagaaattgttttttggttttttgtgagtaggtttcgtttttaggcgttagttttatggttcgtaatcgagggtttagatacgtaggggttggtgtcggtaggagaagggagtggtttatttagtgggtttatttttttttttgatttggtggtagtttatttagagaggtttggatttatttgaagaaatttttaggttaggataaaggtgtttttgttttattatatatatgtaatagtataggattgttttagggcgtttttgtgagtttggggtgttgggtttttgagtttggggtatatttgagagggaacgtttatggtgagttggggtgttgtttgagttgagttgtatttgtgtgttcgggcgtcgtgaattaagggtttgtatggtttggtgtgtttgtgttttagggtttacgatttagagtgtgtgtttgagttggggtgtaggttggatgtttatgtgtggtggggtttatattttcgaattggtcgtgtttgaggtatgttatatgtttttgagtagggggtgtatttttgtgagttaaagattttaagttttgaagtgtttatttgaatgggtagtgtttgcgagttggggtgatcgtgaattggtgcgtttggtttgttggggtgtatgttagaatcgaggtgtgttacgtgattttagatttatatatgggtggggtatttgcgggtgagttggatgaggttagggttgttttttttttgttttcgttttttttcgaggttttttttggtttagtggaaaagggttgtagggaagcggttcgatttttttttttttattattttaatttagattagttagaagggagttttagattttgtcgggttcgtttagcgttatagttttaggtttagcggtgtttttagtttttttggagttgttatttacgttggtttttttaggttttttttcgtggtcgcgcggggagggtttttttcgcgatcgggcgtttttattttatgcggttttcgtttttagttttcgttttttttttttcgtt

SEQ ID NO: 127 - DNA, 3574 bp, Artificial Sequence
  chemically treated genomic DNA (Homo sapiens)
tatatcgtttttttcggtgagttattttattttaagtatttttttttattatatgattttgttttatttttttattgtattaagaatatttgaaatgtatatgtttatatttatatagtttatttttttttgagaacggaagttttatagaaggtgaaataaattttgttagttgttgttagtcgtatagtaagttttttgtagaaaatgtttattggttatatttttttaaaaagcgaataaattttaagattaagattttaaattaaattattttagtttttaattgtttatagcgatatattgagaaatcgagtgatttttaagagaaaggttattttgaggttggggtcgaattaaaatttagggggtttatattaggttagtatttcggaattggttgttttgtaagatttcgggagtattaaattggtatgagatatttgataacgaggttagttatgtatcgagtttaggttttattttcgttgtttttttgacgttagaaaaagtacgagttgttgtatagttttttttattaaggtgataaattatattttcgttgggttttgtattttgtaaattataaatttatttttttttttttttttatattgaaaaatgtaaaaatttattgtagagaggttaaaattttttttaaacgtaaataaatatcgttttttagtagaggcgtttttttttatttttgttatatatattatcgcggattcgttcgagaaagtacgtgattttggcggtagttaggtttttaatagagaacgagggtttgtataaatttcgggttcgcgtcgtagagtaagataaaggattttgaattgtagtattattttttttagtttaaggtagtttgtgaaaggtattgggagcggcgtgacgcgggtatcgcgaaattttttttgttgttatatgtatttgtgttttttttaattatagtttagtataaattttaggcgggcgatttggtaggtaaacggtgtttaggtagtcgggtaatttattgggttttagtgggtgttggggagttttatgcgttaggaggtggataatttagggggtaaggggttcgtataagggcgaagatgcgtttttttttcggtatcgatttacgcgtttaaaggtttttgcggtaacgtttagggacgcgaattaggtgtcgggggttggggaggaggtgggattggaagcgagagtagtttgcgtttaagatcgcgtaagaggtggttttttgttcgttggttttagtatatttcggttttcgaaaaaatattatttttgttttttgttattttttgtattttagaaaattttttttagggtaggaaaggatagtgagttattgtaagtattttttagtaattttttttcgcgtttttttattttttcgcgttatagaggggtagagtattaggaaggacggtaaatatgtttcggtttagtggtggttcgcggtcgttatttagtcggtcgtacgtagtatttttcggatattatacgattttttttgggttttgcggatataggaaatttttattaaaggtcggggatttaaatatttttagaatacggtcgcgttttcgggttagttgcgttttttttttagacgtgcgtggtttttggttttcgtaaaaatggaattagatttggtattatattttgttatagttataggaaaatatattaaagttataggaaaataaattaaaaagtaagttatagtttacgtaaaggtgaattcgggggttttggcgttttttttcgttgtcgcgtgcgttcgggaagtataggagatttggatttttttttttttaaaagtaatattcgaaagtatcgggtatagtcgagttttttttgtttttacgttcgtagagatgatttttacgttattttttttttcgatatttaaatttttttttgtcgttcgtttagtttttttcgggaacggataattattttattttcggaaataaagggaaaggtggtaaaaggcgatgtggaggtgttcgttttttcggggtttttattttcggtagtttgatgttttttgtgttaaggtttggttgcggaggtcgggaaaatgtggttttcgttagtaagggttgggtagggagtttggcgtggtttggcggatttcggaggaaggtgaagggcggaggtttttggcgattttttggcggagtggcgtggtcgttttagttcgcgttcgtttggtttttttttttttcgggtcgattgtattagaatttttttttattattaatttttatttatattttgttcgtcggtttcgtatttatatcgatatgtatcggcgttgagggttacgaatcggagttatttttttattgggggacgcgtggttttttcgtaattatggtttgtgatggtttaacgcggataggttattttttttcgtttcgcgcgcggttttttttttttttgtgcgttcgttttttaattaaagttgcgtgttagtgagtcgtgtcggttatatggtgttattgttggcggtcgtattttgttgttttttttttgtagttttttgacgatgtagcgatcgcggttggcggagattgagtaacggggaaagggtgagggaggggttgcggggcgcgcgtgtgttcggcgtattgaagttggtatcgggagtagaggttgcgcgtcgttttggtatttgtttttttttttttcggggttcggcggcgtgttcggaatttagttgcggttgtagttggagaatgagagtttttagggatgggggtggggcggttaaaggggtatcggcggaggataggagggttgtgcgtttcgttggggtttgtattttgggtacgttagagtttcgtcggggtcgaaggagcgagggagttgtattgtgggaagggcgtagtatgaggatggtcgcgggagtggtaggttcgagcgtagttcggagagtcgcgggtagcgtttgggattacgggtagcgttggagcggagggttggttttgggtatagtttgtagatggttcgggttggcgggaaggggatcgaagtggtaggggcggcggggagttcgggtatttttaaaaattttttgtttttaatttgaagcgggaggtattttttttttttcggatttagtattcgtagatttggttagttttttttgagatttgttttgtggagttttgttttggggattgggtgtgaggtgaattagaaggatttgttgagtatcgagaaagtatcggtttaggcgtaaagagtcgggggttagtttttggagggtttggagattttacgtggtttcgatcgaaggatttggtgcgtttaggttaacggagttggggcgttttaagttcgggggacgagggagcggtatggaggggagtaggggtaattgggtttggtttttttttttttcgtttattttttgttttagatatagtttttttttattggttgggtatttgtttgtagaggagttgtgttttaaaatggcgataggaaattttatttgcgttttagttaattagattgttatagcgcgaatttgtagggtggaaacgcgagt

SEQ ID NO: 128 - DNA, 3574 bp, Artificial Sequence
  chemically treated genomic DNA (Homo sapiens)
gttcgcgtttttattttgtaaattcgcgttatgatagtttaattggttgaggcgtaggtgggattttttgtcgttattttaagatataatttttttgtaagtaagtgtttagttagtgaaagggggttgtgtttgaaataaagagtaagcgggaaaaaagggaattaggtttagttgtttttgtttttttttatgtcgttttttcgtttttcggatttggagcgttttagtttcgttaatttggacgtattaggtttttcggtcgggattacgtggggtttttaggttttttaagagttggttttcggttttttgcgtttaggtcggtgttttttcggtgtttagtaaatttttttggtttattttatatttagtttttaaagtagagttttatagggtagattttaggaagggttgattaggtttgcgggtgttggattcggaagaggggaggtgtttttcgttttaggttagggataaagggtttttaaaggtgttcgagtttttcgtcgtttttgttatttcggtttttttttcgttaattcgggttatttgtaggttgtgtttagggttagtttttcgttttaacgttgttcgtagttttaggcgttgttcgcggtttttcgggttgcgttcggatttgttattttcgcggttatttttatgttgcgttttttttataatgtaattttttcgttttttcggtttcggcggggttttggcgtatttaaaatgtaggttttagcggaacgtatagtttttttgtttttcgtcggtgtttttttagtcgttttatttttatttttaagggtttttattttttagttgtagtcgtagttgggtttcgaatacgtcgtcgggtttcgggagggagaggggtaggtgttagggcggcgcgtagtttttgttttcggtgttagttttagtgcgtcgggtatacgcgcgtttcgtaattttttttttatttttttttcgttgtttaattttcgttagtcgcggtcgttgtatcgttagagagttgtaagagggaggtagtaaggtgcggtcgttagtagtgatattatgtgatcggtacggtttattgatacgtagttttggttaaagagcgggcgtataggaggggaggagatcgcgcgcgggacggggaggaatggtttgttcgcgttaaattattataagttatggttgcggaagggttacgcgttttttagtaggagaatgatttcgattcgtgatttttagcgtcggtgtatgtcgatgtaagtgcgaggtcggcgagtagagtgtgagtgggggttggtggtgaggggagattttgatgtaatcggttcggaaaggaggagagttaggcgagcgcggattggggcggttacgttatttcgttagaaggtcgttaggagttttcgttttttattttttttcgaaattcgttaggttacgttaagttttttgtttaatttttattgacgggggttatattttttcggttttcgtagttagattttgatataaaggatattaaattgtcgagggtaaaaatttcggaagggcggatatttttatatcgttttttgttatttttttttttattttcggaggtaaggtgattattcgttttcggggagggttgggcgagcggtaaggggagatttagatgtcggaggaggaggtaacgtagaaattatttttgcgggcgtgaaagtagagagagttcggttgtgttcgatgttttcggatgttgtttttaggagaggaaaagtttaggttttttgtgtttttcgaacgtacgcggtagcgggaggaagcgttagggttttcgagtttatttttgcgtgggttgtggtttattttttggtttgtttttttgtgattttggtgtgtttttttgtggttgtggtagagtgtggtattagatttggttttatttttacgagagttaggaattacgtacgtttggagggagagcgtagttgattcgagggcgcgatcgtgttttgggagtgtttgaattttcggtttttggtgaaaattttttgtgttcgtaaggtttagaggagatcgtgtgatgttcggggggtgttgcgtgcggtcggttgggtagcggtcgcggattattattaaatcggggtatgtttgtcgttttttttggtgttttgtttttttgtaacgcggggaagtaggagggcgcggggagaaattattaaaggatgtttgtagtgatttattgtttttttttgttttgaagaggattttttaaaatgtagagggtggtaggggatagaggtagtgttttttcgagagtcgggatgtgttggagttagcgaataaaaggttattttttgcgcggttttgggcgtagattgttttcgtttttagttttattttttttttaattttcggtatttagttcgcgtttttaaacgttgtcgtagaggtttttaaacgcgtgggtcggtgtcgggaggagagcgtattttcgtttttgtgcgagttttttgttttttaaattatttattttttggcgtatggggttttttagtatttattgggatttagtaggttattcggttgtttgggtatcgtttgtttgttaaatcgttcgtttgaggtttgtgttgaattgtagttagagaaggtataagtgtatatggtagtaaaaggaatttcgcggtattcgcgttacgtcgtttttagtgttttttataggttgttttgggttggggaaggtggtgttataatttagagttttttgttttgttttgcggcgcggattcggggtttgtataaattttcgttttttgttagaaatttaattgtcgttaggattacgtattttttcggacgaattcgcggtgatgtgtgtagtaaaagtgaaaaaagacgtttttgttagaaaacggtatttatttgcgtttggaaggggttttgatttttttgtagtgggtttttatattttttaatataagggggaggaggaaaataaatttatggtttgtagaatgtagggtttagcgagggtgtaatttgttattttgataaaagaaattgtgtagtaattcgtgttttttttgacgttagaaggataacggaaataaaatttgagttcggtgtatggttggtttcgttgttaaatgttttatgttaatttggtattttcgaaattttgtaaaatagttaatttcggggtattgatttggtgtggattttttggattttggttcgattttagttttaaaatggttttttttttgagagttattcgattttttagtatgtcgttgtaagtaattggaaattggaatagtttggtttgaggttttaattttgaggtttattcgttttttaaaaaaatgtggttaataaatattttttatagagggtttattgtgcgattggtagtaattaataagatttgttttattttttatgaagttttcgtttttagggggaaatagattatataaatgtaggtatatatattttaggtatttttagtgtaatgaagaaataaaataggattatgtgatgggggaggatgtttgaaatagagtgatttatcgggaggggcggtgtg

SEQ ID NO: 129 - DNA, 3506 bp, Artificial Sequence
  chemically treated genomic DNA (Homo sapiens)
tagcggtaaagttttgtttacgttaagtaataaaggataagttagtttttgttgtgattattttgttgtattgataagttacgtatttttatttaaggatttaaatttttattttttttaagaattgggttaaaatcgataaattaaatttatttacggtttattgattaaaggttgttgtataataagtttttgttatgtttagtagttggatttatagcgttagaaatttataattgtttgatttttttttttattatattgcgaaaattgttttttaaatgtaattaattttaaaattttaatagtatcgtggttaggcgtggtggtttattattgtaatattaatattaggtataggcgaggggattgaggttaggatatcgaaattagtttgggaaatatacggagattcggtttttggaaaaataattagttttgcgtggtggtgggcgcgaggtttcggttaatcgggaggttatagtgagttatgatgatattgtattatagtttgcgcgacggtttatgttagtaagttttggagtatttgaaataagttgtgttgggtattttatttattggagagcgattagtgattgatgtttatttatagcgattagagacgtatgtttcgatagtagtataaatttagtaggcgcgaataaatggtaaagagaaattgggtaaataagtattacggttttttagttgagaaagtgggggttttaaaaagggttttttgttgatagaaagggacgtttaattatcgaaatcgtagagggtgcggttttggcgtttgagcgcgtagattatatttatggcggtgatcgttttgcgtttggcgtgttttgtataggttacggcgtttcggattacgttttttaggaatatttttagtatttcgcgagttttttcgtagatgaggtcggagatgcgttttacgtcgtcgcggcgagtaaggcgtcggatggtcggtttggtgatgttttggatattgtcgcgtagtattttacggtggcgtttagcgtcgtttttgttaagatttttttcgtttttgtcgcggttagatatgacgagtaagaggagttttatttaacgttttgtgaggattttggtttgaggtagcgtttttatacgatagttggcggatcgaattgagaatttgaaagaagtcggcgggaagtttcgtttcggtgggggaggggaaatttaaagggttaaatcgaaatagggggaaaaaaaaagcgagttttttgttttcgtgttttgaattttgtaacgtgtatagtattttgttattacgttatgaggttttaaaaaattgtttttgaacgtagaagatatatattaatattgtgggaaatataagaaaggataagaaattaagaaattataatgttattttattatataggttagttaattatgtattttgtagagtagttgtatatatttttttaagaaaatgtatatagtgttgtatatggagttttgtaatttttttatattgattataatttaattaatttttattaaagagataaaagtgatgttttggtgtttatgttttttaggaattattaatagttataattagttttttagtaattttttaatcggttgtattttaaaaataatgttttttatatttaatataaatgtattttttttttatatttgggattaatattgaaatttatgattttattatattaaaatttaaattttattatattaatatttaaaattgtattagaggttttatgatttggtattacgggttttcgtattattttttttttaaattttttaatttgttttattaaggtttttggataattttagagattttttgtgaagtttgaataaaattttttcgagattttgataattgtattagttttaggatttaattggaatagaattaaaatttttaaaataagtttttataattagaaaattggtgtttgtaggttttgtgtgtggggtttttttttttttttggaaggagtttcgttttgtcgttaggtcggagggtagtggtgtaatttcggtttattgtaatttttatttttcgggtttaagcgatttttatgttttaattttcggattagcgcggattataggtatgcgttattacgtttagttaattttttgtatttttagtaaagaataagttttattatgttggataggatgtttttgattttttgatatcgtgattcgttcgttttagttttttaaagtgttgggattataggcgtgagtcgtttcgtttggacgtttgtaggtttttaaaaagatatttttatatgatttaattaaagatttgttattaattattatggagtaattttgatttcgtatatttgatttttttttttattaataaatatagggttatattttgaatttttttttttttttttttttttgtggagacggagtttcgttttttcgtttaggttggagtgtaatggtttaattttggtttattgtaatttttatttttcgggtttaagcgatttttttattttagttttttttgagtagttgggattataggtatttattattacgttcggttaatttttttgtatttttagtagagacggggttttattatgttggttaggttagtttttaattttcgatttcgtgatttatatgtttcggttttttaatgtgttgggattataggtttgagttattgcgttcggttattttgaaattattttaatattaatgaaaattataaaatttttataattattttaatataattttttagtatttaattttttgtttagaaagtagttaagagttgaaattttggaaatagaaaattttggttttagattaaatgtttattttttagattcgagttgatttgttatcgattagatacgaggtgatttgtttattttttttaaatttttgtttatttataaagttagaataggatagtgacggtattgttggggtgtagaatgattttttaaaatgtggtttttgggtatgttgagcgtttttgaatattgaaaggttttagaaataagttttagaattaaagtttttttaatttcgtttttttttttatatatgcgaagggattttgatattttttaatcggattaagaaaattttttattagaagtaataattgttttttattttttttttgttattttattattgtagaaaagaatattgaatatggattttttaagataatgtttgtttttcggttttatttaaattattaagatatattaggtgttgtggttttttttattaattttagtattgtgggaggtcgaggtaggtggattttttgagtttaggagttcgagattagtttggttaatatggcgaatttttgtttttataaaatatataaaaaattagttaggtggtgttatatgtttgtaattttagttatttgggaggttgaggtaggagaattatttgaatttgggaggcggaggttgtagtgagtcgagatt

SEQ ID NO: 130 - DNA, 3506 bp, Artificial Sequence
  chemically treated genomic DNA (Homo sapiens)
aatttcggtttattgtaattttcgttttttaggtttaagtgatttttttgttttagttttttaagtagttgggattataggtatgtgatattatttggttaattttttgtatattttgtagagatagggattcgttatgttggttaggttggtttcgaatttttgagtttaagggatttatttgtttcgattttttatagtgttgggattagtgggaggagttatagtatttagtatgttttggtaatttaaatgagatcgagaggtagatattattttgaaaaatttatatttagtatttttttttgtaataatgaaataatagggaggggatagaaggtaattgttatttttggtaagaaatttttttggttcgattaggaaatgttagagttttttcgtatgtatgggaaagaagacgaagttagaggggttttgattttgaagtttatttttgaggttttttaatgtttaaaagcgtttagtatgtttaagaattatattttggggaattattttgtattttaatagtatcgttattattttattttaattttgtagatgagtaaagatttaaaaagaataaataagttatttcgtgtttgatcggtaataagttagttcgagtttgaaaggtaaatatttaatttaaaattaaagttttttatttttagagttttaatttttaattattttttaaataaagaattgaatattaagagattatattagaatagttataggagttttataatttttattgatgttaaaataattttagagtggtcgagcgtagtggtttaagtttgtaattttagtatattgggaggtcgaggtatatggattacgaggtcgggagttggagattagtttggttaatatggtgaaatttcgtttttattaaagatataaaaaaattagtcgggcgtggtggtgagtgtttgtaattttagttatttaggggaggttgaggtgggagaatcgtttgaattcgggaggtggaggttgtagtgagttaagattgggttattgtattttagtttgagcgaaagggcgagatttcgtttttataaaaaaaaaaaaaaaaaaaaaaatttagagtataattttgtatttattaataagaaagaaaattaaatatacggaattaaagttgttttataatggttgataataaatttttagttgggttatataaaagtgtttttttaaaaatttataagcgtttaagcgaagcggtttacgtttgtaattttagtattttgggaggttgaggcgggcggattacgatgttaagagattaagagtattttgtttaatatggtgaaatttgttttttattaaaaatataaaaaattagttgggcgtggtggcgtatgtttgtagttcgcgttaattcggaggttgaggtatgagaatcgtttgaattcgggaggtggaggttgtagtgagtcgagattgtattattgtttttcggtttgacgatagagcgagattttttttaaaaaaaaaaaaaaattttatatataaaatttataaatattaattttttagttataagagtttgttttaaggattttaattttattttaattaagttttaaagttaatgtaattattaaaatttcgaagagattttatttaaattttataaaaggtttttaaagttgtttagaaattttggtgaaatagattaggaaatttggaaaggaaataatgcggagattcgtagtattaaattatgagatttttaatataattttaaatattaatgtaataaaatttaaattttggtgtaataaaattataaattttaatattggttttaagtatagagaaaaagtatatttatgttgaatgtggaaaatattatttttaaaatatagtcgattaaaaaattgttggggaattgattataattattgataatttttaagaaatatagatattaaaatattatttttatttttttaatagaaattggttaaattataattaatataaggaggttataaaattttatatataatattgtatatatttttttggaaaaatatgtgtaattgttttgtaaaatatatgattaattagtttgtgtgatgggataatattgtagttttttaattttttgtttttttttgtattttttatagtattgatgtatattttttgcgtttaaaagtaattttttaaagttttataacgtggtaataaaatattatgtacgttataaaatttagaatacggaaataagaagttcgttttttttttttttttatttcggtttggttttttagatttttttttttttatcggggcgggatttttcgtcgattttttttaggtttttagttcggttcgttaattgtcgtataaaggcgttgttttaggttagagtttttataaagcgttgggtgagattttttttgttcgttatgtttggtcgcggtaaaggcgggaagggttttggtaaaggcggcgttaagcgttatcgtaaagtattgcgcgataatatttagggtattattaagtcggttattcggcgttttgttcgtcgcggcggcgtgaagcgtattttcggttttatttacgaggagattcgcggggtgttgaaggtgtttttggagaacgtgattcgggacgtcgtgatttatatagagtacgttaagcgtaagacggttatcgttatggatgtggtttacgcgtttaagcgttagggtcgtattttttacggtttcggtggttgagcgtttttttttattaataaaaggttttttttagggtttttatttttttagttgaggagtcgtgatgtttgtttgtttagtttttttttattatttgttcgcgtttgttgagtttgtgttgttatcggagtatgcgtttttagtcgttgtaagtaggtattagttattaatcgttttttagtaaataaaatatttaatataatttgttttaggtgttttagagtttattgatatgggtcgtcgcgtagattgtagtgtagtgttattatggtttattgtagtttttcgattagtcggaatttcgcgtttattattacgtaaggttaattatttttttaaagatcgggttttcgtgtgttttttaggttagtttcgatattttggttttaattttttcgtttatgtttaatgttggtattatagtagtgagttattacgtttggttacgatattgttgaggttttagggttagttatatttaaggggtaattttcgtagtgtagtggggaggaaagttaagtagttataggtttttggcgttgtgaatttaattgttgaatatagtaagaatttattatgtaataatttttaattagtggatcgtaaataagtttagtttatcggttttggtttaatttttgagaaaggtgagaatttgaatttttgagtagaaatacgtagtttattagtataataaagtgattataataaagattaatttattttttgttatttaacgtgggtagagttttatcgttg

SEQ ID NO: 131 - DNA, 22489 bp, Artificial Sequence
  chemically treated genomic DNA (Homo sapiens)
ggtcgttgggagatattgtggttagtggggcggggggttcgggtatttgtttttagattttcggttattttaagtgataggaaggggggttagtgaggatatgaatagtggtcgtttttatttttaagggttggttttattgtttttttatttttgtttggtttagtagttttgggagtagttattttgtagtttatgcgtgtggggattttgtcgtgttttgagttgtcgaagtagttttttattgggtgttgtgttgggtttttgtttttattttgtagggaggaagtatagttgggggagtggtttttcgagggtttttgggagtttagattttatttttggaggtagttttggggaggttcggtggagattttgtttttttgttgaagttgttgttgaagagtgataggtttgtttagcgtcgggggagattcgggatttttagagggagtgtaggatagggtagggtagggtagggttatgattttcggtgacggttaggttgttatgggtcgaattgttatttttgggtttgcgggtaggcgtttagttttttaggttttattttttttatttaaggaatgggatacgtatattttcgtttttagggtggtgtagagaataggacggtgttttcgagtagtgtttttaacgtcgtttggggtttgggaatgtattaggatttgataaataaatattagtttttaatatttcgttttttgtaaggagaaggttaggaacgtttcgtttagagagaaggcgagtttacgagtagtagatagtcggtgtttaataggtgttcgtttttttttagagttttagggtgttagttggttagagtgagtttcgttgattagggagttgtggtagtcggtcgggggtcggtttttggggtaggtgggatgtttgtggggtcggcgtaggtttaggttttgtttgggagtgttttgtttcgagtattggtttggatatttgagttgagttttagataggcgtttcggggtcgattcggtaggagtagtcgttattttcgggtagttgagtttagtagcgagggttggtagaacgatttagacgaaatattgaatttaatagtaaaattatttttttcgagggaaaatacgattcgtagttagtcggcgcgtatatatggggtttggaaaagaagagaatttcggagatataaacggttttacgcgtcgtcgtttcggttcggttgttaagttattaaatttttgtatagggaaaagcgataaagtaaatatttatttttttcgtcgtttttagaagtgaaaggtttttgagatgggaaatgtagacggtttgtagagtgttttatttaaataaaattattagatgtttgaagattttgggagaaatgggtttagatgaattatttgcgtaaagttatttagtatttcgtaggggtttcgaagttcggtgtcggtaaggtgttcgtcgttggagtaggggtggttgatggatttggtgcggggtgggcgggaggagtcgtagatttagatgtaggaggtttggtggggttattgatttacgtttggttcggggttttgtttttggggtcgggaggggattaggttggggaagttggggagggggtttttttttttttttttttagttgttaggtcgttagtgggagatataggttttggggattaggttttgtaattttttttgatttcgacgtttgagattggtttggtgttggttttgaggtttttgtgtaattttagttcgggttggttgcggaggatttttgagggtttttcggtaaggtttttttttttttagttggttatggtatataggattttattttttcgtatgtttagggtaggtatcgttaatcgagttttgtattttttttaattttttgtattagggtttattaggtttatttatttttgtgtttagattatttggtcgatgggcggttttgttttaggaggaataggggtttttttgtttttttagagttttcgttttgggttttgtatttacgtttcggatgtgtcgttttttttatatttgggagttacgtcgattttttttgcgtttttttggggagatatttttttgtattagagatcggtttttcggggtttgggcgtgggggcggggatttggatgttgggggtgtagaggttatggtttcgttattttttttgattttgttatgagagtatgattagggtttgttggttttttgggttttgacgttttcgggttcggtatttttttggaagttttatttatttttttttttttttttttttataaggatttttttatcgtaattttgtatgattttattttagttgattaaatttgtaaaaatggttaggttcggtggtttatgtttgtaattttagtattttgggaggttgaggtaggtagattatttgaggttaggagtttaagattagttcggttaatatggcgaaattttgtttttattaaaaatataaaaaatagtcgggcgtggtggtaggcgtttataattttagttatttaggaggttgaggtaggagaattagttgaatttgggaggcggaggttgtaatgagttgagataacgttattgtattttagttagggtaatagagtaagattttattttaataaataaataaataaatttgtaaagatgttattttcgtgtaaggttatacgttgaggttttgggtggatatgaatttgggggatatcgtttagtttaggataggaattaattgtagtagggtagttgtttcgggtatatagtttgattggtatttatttttggtaggtttttcggagtttggtttttttattatggggcgggggttttagttatttttttgggggagtttttaatttgaggttttttgtgtcggggtttagttagggtgggggttgtattttatttttggagtaggtatgttgggttttgatagtaagttggggagggttttagggttagaggaggatttaggggttgaaggtagtgatgggtttagtaggtagtagggagggtagggtaggggaggggtgttaaggtttataagcgagaggaggtaggagggaggatatggtatttatagttgtggtggaggagggagggtgtttataaggtgggtttttagtttggagttttaggtatttttcgttgtggttatcgattgttggggaattgattagttttatagtatggtatggagttgggttaggtagggttggatgttcgttaggggtattgtaggtgggttattaggggttggtttggggtttagttgttatttagttgatacgggattattaatggttgttatggtttaggtattttttttttgttacgttggggatattgtgatataggtttttaggttagtgaggatagtgtgggtgtcggagtttggagggaggggagtggtatcggggaggttttcgtcgagtttggatagtggggtaggtggaagggtgtgtgttcggtcgtgtattttgggtttggtgagcgtggttgaggggtatagttgtttttggtcggggttgtagtgagtgtttagtttatttggttataggttggttattagggatttggcgtttgttatttataggattgaggattttaatagtagttttagtttaggtttcgaaaagttgagtagagaagggtaggaggttttcgtatttttgggatttatttttggtaggttgggttgggttgtgggggatatatttgttttgggggatgtgggaggggggcgttttcgggtttgtagttgttggtttcgaggatagacgtagtttttttagtaatagttgggtcggaggttcgggagttaagagagattagagtttaggttagttcggtttttattagggattagttatttcggttatagatgttagtaggggggatttttagggggtgggtattaggttggggtgggtagttggggtgggtcggggttgtagtgtttttttatttagttttgggtataggacgagttagtttttatttttgtttatttagtatttcgtaggggttgttgttttgttgagtgtaggacgttgattttaggatgttattatttgatgttgtttaggttttttttttagaatatttgtttagtgattatagttattttagttttttttattgattttaggtagagtaaggggttttatttgtatttagtaggtgtagattgggtagggtagggttttaggagggtgtatgtttggggagttttcgtacgtagatagtggggggttagggaggagttacgtgttgggtataaggtagttttcgtaggttttttgttgggtttgttttagtacggagggatcggtagtatatagtaggtgtttagtaaatgtcggggggcggggataagcgagtatttacggggggaagtattggttgcggtttcgttatttgttttggtagtatttttatttaggttttggatgggcggcgattatcgtttttttgtttttggggttttgatttttagtattcggtagtcggggattcggttttttttaaggtttgggagtagttaagtggttaggtattaagtggtaaatttaggttagggttgggtgacggtttggagggtttttgtggtagttgagtttcgttttttttggttttgtttatttttttggtgttgtttatttttttggtttgtatatttttttggtttgtatatttttttggtttgtatatttttttggtttatttaggttgttattggttcgagggttttagtgaggatgagtcggagatggatattgagggggttgacgggtttggggtaggttggtcggggtaggggggttgggtttgtttagcggtcgtttgtttttagaagaatgatattttgtttttttttttgttcgaggaggtggggtgagggttagattttagtatttatgtttttgttttttttttttttgaaaagtttatagatttttatttgaattgttttagtagagtttaggcggggtattatttttatttatatatataaagggttgagatagtgtagtttggcgtgtgagtagttttggtgtttttaggttggggtgttgttcgtttgtttatttggttacggtttttaatagtcggtttagtaaaggataggtagattttacgggttaaggatgcgttggtttggtcggtgcggggttaggcgggtagtttgttaggatttggggattttgagttagttgttgtagtaggtgtggtcggtttagttaggtaagttttgttgtcgggagggtcgtttattagttgttggagggtgtggggcggtcgggttggttattcgtcggtagtaaagttagtagagagtgggtggggttgggggaggcgggagggttttagttttatttttagggtttagtttttttgggttttgtagttaggttaggaaggttagttgggttggttttgggttttaggttttagtttggaaattaggggttttaattttggtatgagaaagttttcgttatagggtaggaggagttttatatagaatttttaatttttgttttcgggtttgagtttggtaggattggacgtcggatatcggcgttgttgggagttttgagaattgtacgtgtgttttttagtggttagcgtcggtcgtgtttcgtttgattttttaggttttgatgcggggttttggggtttagggagtcgaggttcggggtgggggttgtacggtggtgtggtttttttagattgtaggattagagggtagttttgaaagtttttttggttagggagttggtttgtagagttgaaggggaggagggggttaggaggttgtttgcggtcgtggttttgaaaattaggttttgttaagggtttttgagggttagttggggagggaagggtatatagtgtgtttagagtaggattttagggcgttcgggtttagcgtttttggggataaagggagatggagtagaggggttttagggaggttcgtttcgtggtggtataagagttattgcgaatattttgttttggtgaggttgcgttttaggtgttaatagttatattttagtatattaggtgtaagttattttttataggttttagtttgttgtaggaattttaagttttaggtcgggaaggaatgggtagggttgtcgtagggattgtggttttgtaggacgagggtttgttaggggtgtttaggggatagcgggtcgggacgtgttggggttgttgtagggattgtggttttgtggggtgagggttggttggggtgttggggttgtttttgggtggttaggttttatttgagagttcggttatgggatttaaggttagagggtggtcgagttgagggttgtttgttttgggggggtttttggttttaaatttatttatttggggggcggtattgaggtaggtttttaagggtagaaaggggagtgatttggtaaaggtagttttgtgttgttttttttttttcgtttatgttacgtatattttaatgaaataagaaattttttttgatttttttgtgggtttggtgatagcggtattttgtttagtttagagtttttaatttttcgaggtagtaggagtacgtaggtgggcgggtgtaggagttggagtgaatatttttgggtatagtaggagtagaatttcgtgtagttttgtggtagtgtttagggtagtgtttgtgattcgtgaagttttagagggtgtgtgttatagtgtttttagttttgttgtttaaggatgtttggagtgtttaatagtttagtggattttttgttttttttcgagggtagagggttagtgtgatagttttttgtattttaagtttttgtttagtatttaggaaatattaggttgtatgaagaaattgaaggatagtaaatgtaagggattttatggtcgatggagggagggggatttggaaaggggggtggagggggaaggtgatggaagaggtttttagagggagggagagttggagagggggtggagggggaaggtgatggaagaggtttttagagggagggggagttggagagggggtggagggggaaggtgatggaagaggttgttagagggaggggagttggagagggggtggagggggaaggtgatggacgaggtttttatagggagcgggagttggagagggggtggagggggaaggtggtggaagaggtttttagtgggagggggagttggagagggggtggagggggaaggtgatagttttttgaagttttgtcgtttttattagatttttttttaaagttttgttgtttagttgtttttttgaggttacgttgtttttttttgatgttaaattgttattttcgatggttagttgttttttttttttttgtttgttttgttttttgttaataaggttaggagtttttatgggtataggatgggggtggggcgaggtagtggtggttttggaaaaggtagtattggagtagggaaattggaatgcgtgtttttatttagggttatgtttttaggtttgagggtggggttttttaggaattttatttttttttatttagaatttttgttttttgtttttattattgagggttcgtgaggttgatagtatttatttttaaagaaggattggtttgggtagggttgttaggagtattagggtagggtttgttaatttagaggttttcgaggaatagatttaggtttgggaacgggtttacggtagggtttttttggaaatgtttggtagagtgggtaggggacgttattgtgatttcgtattgtcggggatattaggtttagaggggttgattgattagttaaggtcgtataatagagttgttgggagcgggtttttgttaggtcgtgggatatagggatttcggttttcgttgtttttgttttagttttagtttaggatttattgtggttgttattgagttttagttttagagtcgtttattaagttcgattttacgtagggtttattgtgtttattagagggcgttagaagtcggcggtttcgatatcgcggtttaaacgtagggatcgttcggtgggggttgttgtaatttttttttcggcgtgtttaggttttttttcgagggtttttagggtcggggtttggtcggggagagaattaggtgtggtggagttggggagttcggcgttgggtagtgggcggtttgtgtttggggatttcggtgttattcgttaggtggtagggaggttggttttttttaggagtttttattttttgaggtggttttaagtttttgttgttgttttttttgttttacgttttatttttttgtttaattttttcgatagggttcgggtagggacgaagtagggtttttttattttggagttgggaggaggggggtgggggcgttattaagtatggggtttaggtagatttagtttatgggggatatgggggttttagggtgaggatttttggggggttggtcggggggcgtttagagtttacggagagcggtttggtgggggaggttttgttagtagattttttttttttttattcggagtttcggtttttattagtttttattttttgtttagtgttcggtttttgtttgtttttggttaatgttgttatttgtttttttagttaaagattttatgtttacgtgatatgattatgataggagttgtggggggttttagggaggtcggcgttgggtttgaatttgtttcgtgaaggtttcgagttttcggttgtcgtattttgattgtttcgtgtgaagggaagggagttatagttacgttataagagaaggggttgttgtttttttaattttcgttttttcgtttgttttaatttgtttgggattttttagagtcggttgggggttttagtttagttatttaagttgtattttgttttaggaaatttttacgggttttgattagtgtttattagggtttttaggatattttgggggcgggaagtgggggtaggttttatgtttgtattttatttgcgagttttcggagtttttttgtatattttatagggttggaggggttttgtgttttagacggagtttcgttttgttgttcgggttggagtgtagtggtgtgatttcggtttattgtaagtttcgtttttcgggtttaagggatttttttgttttagttttttaagtagttgggattataggtacgtgttattacgtttggttaatttttgtgtttttagtagagatggggttttattatgttggttaggttggttttgaatttttgatttaagtaatttgtttattttagttttttagagtgttgggattataggcgtgagttattatattaggtatgtttttgagataaggtttcgttttgttttttatattggagtgtagtggtgttattacgttttaaggtaattttaaatttttgggtttaagtgatttttttattttagtttttttagtagttgggattgtaggtgtgtgttattatgttttataagttttttaattttttgtagagattggggtttcgttatgttgtttaggttggttttttgaatttttgattttaagtgatttttttattttggttttatagaaagtgttgggattataggcgtgagttattgcgtttagtttagggttagaggtttttttttgttttttttttaatgtgtaggtgttttttgatgttttttattttttttgttgggtttgggtttcgatttattttttcgatgttttgagtagggattggagagtgtttttaatgtgaaaatattggtttttttgtagtttagttttagttttttatttgttattatatggggaggtattatttgggtgatttttttagggttgttttttaatttttatatttttttttggttatatttaatttgttattgaagttattagttgaggtttttatattaatagttatatttttcgtgttaaaggttttgtgtggttgtttttttaatttgttgggttttttttatgttattatattgttttttatttttatttttatttttttagttattttaaatttatgtataattttttttttttttttttgatagatttttattttgtggtttaggttggagtgtagtggcgtgattttggtttattgtaatttttattttttaggtttaagttatttttttgttttagttttttaagtagttgggattataggcgtttattattatgtttcgttaattttttgtatttttagtagatatggggttttattttgttggttaggttggttttaaatttttgattttaagtgatttgttttttttagttttttaaagtgttaggattataggcgtgcgttattacgtttggtttataattttttaattgttttattattatttttggtttttaagatattattgattgggtgtagtggtttatattcgtaattttagaattttgggagatcgaggtaggtggattgtttgagtttaggagttggagatagtttaggtaagttggtgagattttttttataaaaaaatagaaaacgtttattggatttggtggtattgtttatagttttagttatttgggaggttgaggtaggaggataatttgagtttaggggtttaaggttgtagtgagttatggttgtgttattgtattttagtttgggtgatagagtaagattttatttttttaaaaaaaaaatggaatattaaaaattagaagatggtgtcgtgtttgttagtttttcggggtgtgagtttattattgcgggttattttttttatggagtttaagttttagggggatatatttttacggagggtgtatgtttgtttttgttggagtttgggtggtttttaggttttggaattagattttatattttttatttcgtttattggttgttagtggtgttttattcgtgttttggtgatagaggtagcgtttcgggggtataggtatcggcgttagttttgagtttgaattttagttcggttttagttagttgtatggttgagggtgggtgggggatgtttttgttttgattttttatatttttatttatagtgtagttttattttttttataggagtcggagggttatatgggaaaataggtatggtagacgtaaaaggtttagtggaaatgtcggttttttttgttgttattattgtatttatttggtaatttcgtattataattcgagatttagaagattttatgttttaggcggggttgaataggatagatttcgaagagtcggtttttagatcggatcgttaataattaggtcggatttcgcgtttttagtcggttagtgttttggtaaggtaggagcgggtgaaatttttagtttttttagggagtagttagatgatgatatatttatattcgtttatagggagggagtgcgataaggtttgtggttttttgcgcgagaatcggttagtgttttttggggttcgggatggggttttagtatttatttttattatcggggttcgggagggagggttggagagtttttatttggtgtcgtcggtggttattttttagatagcgcgggcgggttcgtaggttttgggtaaatgtggtgttgttatagtttcgttttatagggatagcggttagtagttgtttttggtttcgtcgtttttaatgaagttatagatggtagtttttaaatgtttttagaaatggtagagaggtttttagagttgacgtgtaaataaattgttttttaggttcggattatataattttgttgggattaagtataggtttgggtttttcggttgttttttagggtttggttttgttgagaggaggaagtttggtttttgggagggggttttaggtgttttttttatggagtttagtaatttggtaggtgggggtgggtatcgtttttttttcgggattttattttttcggtaattagttgttttttttttttttggggttttaggtggtttttatggaggggtgggtgggattgaggtttgagtttcggggaggagttggttggtgagttatgtattttagtggttattgcggttagtcggggaggttgaattttaggttttagtatttagaagttggtggagtgggttgaattgagtttttttaaaaacgtatgtcgaagttttgatttcgggtatttgcgagtattggaaatggggtttttgtgaatgatcgagttaagatgaggtcggacggggagggttttaaaagtaacgatcggtattttgtaaggaggttgttgatagtagggagaagtcgggcgcgtgacgttagaggtagagattggagagaggtagtttaggaatattacgggtggttggtagtgcggagcggtagggtttttttttggaggtttcggagggagtgtggttttgcggatatttcgattttaggtttgcggttttagggttggaggggtcgcgttttcgtggttttagtttttagttcgtggttttttgttatggtagtttcgggagatttatataggcggtgattgtggataggatttttgattttcgggttatagtttttttatcggtttttgttacggggtaaataggtttggggtggtgtttaggtcggggaattgttttagttgtttgtcgtttttgttgtggttgacggggtcgtttcggttgtagtttcggttttggttttttgaggtttcgtattttttttggtatttattggttgggttttcggggtttttggttatttcgtgggtgttgattgaatcgggataaacgttgtgtgtagttaaggggtgatttaaggtcggttaggtttagagttgattttaggtcgggaatagtagtagtgatggtgtcggtatttatcgtgttttttttagggttcggtcgtgggagtcgaggggacgtgtttgtggtttttgtggtttgagtttggaggttagcgtttagcggtgtggtatttgggtatttttgttatttgtttgtagttagtgtgttttcgtggggggtagcgaggtgatcgggtttttgttgggtgtttttggaaggtttagaggtaaggatttttaggtagagagtttgggggtggttttaggaaatattcgttattgagggggtgttgtgaagggaaggggtgggtgttaatgggtagtagtgagtaggttatcgttgtgggtagattttaggaggtagtatttcggagttgtttttattatagggaagtggttaggttgtagtggttgtattttagggtatggatttattatatttttggtcgtttttacgtttaggttaggttttttgtggttagagacggttagagttataggggttgtaggaagtggtcgtaggtatggttaggggtaggtggtatttgtttcgagggtttgtacgtggtttttttgtttcgttagtttttgttatgtgggtttcgggaaattggcgtttaattttatgagtagttttgggttttggggttttagattttttaacgttgtcgtgttcgtaggaggtgtttcggggttttagattttttaatgttgtcgtgttcgtgggaggtgttgtgggggtttcggattttttaacgttgtcgtgttcgtgggaggtgttgtgggggttttagattttttaacgttgttgtggttatgggaggtgttgtgggtagggttgatttcggggtttagttggttttttttcgtttaatgttagagaagggaagtgttgagtgtttgagggggattagtaggggaagggggtatagttaggtttatggggtgattaggagtagagattttattttattaaagtatatatattggttgcgtttgaggggaaaggagtttagggaggtggatgaggtgggtagggggtgttcgtcgttggtttggacgtttaggggggtattttattgtttttggggttggtaggttttagattttttaagtttacggtgttaaacgtgattttttatattgggcggtagcggttataattgtgaggggtaggtagtggttgtttggacggggacgtgtttgttttttgacgaggagtttgcgttttatttaagttttttatttgtatttttggcggggtatttgcggtttagtttggtagggattttgagtttgggtttgtgggggtgtggtttttgggggagggtaaatttcggtgggtattggttatcggtgagtcggcgtcgtggttatagtttttatatttttagtcgttgtaggttttcgttttcgtacgttatttagcgttacgtttttgtatttacgtagagttacgttttatttgtgcgtttatgttgatttattatcgatttttttcgagtgaggagttttcgttaaacgttattaggtttttagtttttagatgaaatgaaatggttgatgaattattatattttaatatattaggaaagatggatttatttgtattcgatgagtaaaatgtatttttttattgattgaaaagttgatgaggtaaataaattagggaaaatggttttttttttatttttttttgagtagtaaattaagcgatttaaaagagttttgaatgagttaataataaaatgtttttaaatgtggaaatgtgaagtgtaaatattttagttttattgttagtgtttatcgaggatatagtttgtttttcgttttgggaagttgggggttgtggaggatttcggttatttggatatttagttatattttaaagtttttaaggggagatggggtttttagtaagtttgttcggattagttaagatgaggggttttaggagttaatatagatggagttgttaggcgtggtggtttaagtttgttattttaatattttgggaggttaaggcgagaggattatttgagtttaagagtttaaggttagtttgggttatatagggagattttttttatttttaaaaagatttttaaaaattagttaggtttgatggtatttgtagttttagttattcgggaggttgaggtgggaggatcgtttgagtttaggtattagaggttttagtgagttatgattatattattgtattttagcgataggtgagatttcgtttaaaaaatattttataataagagagagagagggagggaggagtttgtatcggttgaattattttagcgttttggggttgttgtagtgtaggtttataatattagaaatttatttttttttagttttggatgttacgagtttaaaattacggtgtgggtagtacgtagtatatttttttcggaggttttggggaggattttttttttttttagttttgggggttttacgtttttgttgcggtcgacgttttagtttttgtttttgtttttatagggtttgttttgtgtatttgtttttattttgttttgttttttatggaggaatattagtgattgatttgggatttagttttaatttagggtgatttcgtttttagatttttaattatatttgtaaagttttattattagggaaggttgtattttgaggttttgggcggatatgaattttgggggtaggatattgtttagtttagtgtcgggcgtcgttgtgggttaggttttttgatttttgtaagtttacgatggttatagagttttaaggaggaggttttttggaggaggcggtttagtttattagagaattagtatgttttttttttgggttttgggattagtatttttaacgataagtttttttggattacgttgattcgggttgagatttgtcgtttgtcgcgcgttttgggcggaggttagataggtcgcgtatttttaagttttgatacgttttttttttaaagggtggaggttttatagggtgagtgtaggttggggatgggtcgtggggttgtcgggaggggattagtgggggtttgtagtgttttcgggagggttcggggttgggggtaatcgagatttgtttcggtgggtgagtggagaagtatttggggggttttttttagcgttggagagaaatgggtgatgaagtttgggaaaggcgtggggggttcgaagcgtgtattacggtgagaaggttgcgcgtggtcggattttagttttttcgcgtttgcgaaaggttgagttgcgtcggtcgggggagggtcggaggttgtcgggggttgggggatgaagagtcgggggtagtttagggtagcgtatttttcgcggaggtaggaacggtaggcggtgcgatttttattaggatttttgttatcggaatcgcgggtttttgtcgggtcggaggcgtttgagagattttcgcggaacggcgcgtgaatttgcggtcgcggcggcgggttcggatggagatggacgttggatgggttgttttttgagtttggttttcgtggcggggtcggtttttcgtttttgtatttggtagatttgatgcggagttcgagggtggttgttggtttggggcggggaaggggttttttagatcgggggttttatttgttgggtttggggagtttatttggttttttttgattggtttggagttgtaggtgaggttattttaggaagttgttgtatttgagggagttcgggtcgttttgggggacgttggggtttgatttttggggttgggggttgtacgggtgggtcggggtttgtttgggttggggttcgcggtcgcgtggggtttggattggcgtttgtttggtttgggggtttttagtcgtatgtagtttgggtcgaggtcgggggttcgcggtcgcgtggggtttgggtcggggtttgtttggtttgggggtttttagtcgtatgtagttcgggtcgaggtttgtagttgcgtggggttcggtttttatggtttttgtgtttggatttcgttttttaattattttttttgtacgtttttttggaaaaggatatggggtttagggtggtggatgtggatattttttgaaatttattagttttggtttgtgatgtttggatggaggggttatagttacgtcggtttttagtttttttttagatattttagtttttggaggtagggttttttcgtgaggcgtattatttttgagcgttttatacgtttgtttttgggtatttttttgggtggtggtgtggtgcggttttgcgtttttatttaaattttatatggaaatggagtttgtagtgtgacggtggggtttggtggggagtgattgggtagtaggggcggatttttcgtgaatggtttggtttcgttttttttggtgttgttttcgagattgtgagtggttatttaattgtgtttcgtatttgttttgtttttttcgttttcgtttacgttatgtgagatatttgttttcgtttcgttttttattacggttggaagttttttggggtttttttagaagtagaaatatttgtgttttttatatagtttataaagcgtgagttaattaaatttttttttttataaattatttagttttagggttttttttgtttgtttgtttgtttgttttggtggaggcgggggtggatagcgtttttttttgtcgtttaggagggagtgtagtggggcgattttagtttaatgtattttttgtttttgggttgaagtgatttttttgttttagttttttgagtagttgggattatagttatgtgttattatgtttggttaatttttatatttttagtagagacggggttttattatgttggttaggttggtttcgagtttttaattttatgatttttttatttttaacgtttcgttttggttttttatagtgttgggattataggcgtgagttattacgttcggtcgtgggtattttttagtagtgtaaggatagattatcgtatttggtgaacgtttttgacggtagtaatgaggtatatttgggggtgtttcgtggtagatatatttgaaggtggttggggttgttagcgagggaatttgggaggagttaatcggagatttaagttttttttatgagaaatatttgagttttggtttgttttgtggaattcgggttatgttggggattgaggttttttgttttgggtttaacggaggttgcgggtggaggttgttgggggagggtgttaagtgaaaatgttgtagggagggcgtgtttttggcgggggttgtggttttgtggtggtcgtggtttttgttgtggttgcgatttttgcggtggttgtgattgtgggttttgcggtggttgtggtttttgagatggttgtggttttgtagtgggtgtagtttttttattttatttgttgtcgttggatttttttttttgtgtgtagttttcgttaggattttatgtttggattttggttttgggttttttttttggtttcgtgagattggcgttatttttattggagttaataggcgttcggtatagttatttttagttttttttgtttttggacgagttggtggtcgtttttacgtaggaatgtcgatagtttttggtattatatagggttaggattttggttgtgattttttttttagtgattttttgcgggattgatggttagagagggggtttgtcggttttgtagtgttttttttattattagttatattgagttttgggtaggagttttttggttttggttttatttattttaggaggatttagtgagtttagtttttatttgggatatcgtagaggttaagtttattattgtgaggtttagtgggtgtcgggagttatggtaatttcgtagggatggttttcggttttttttttagggattttattttagttgtgatttgttttacggtatttgtatcgtgatattttttttgttgtttatgtggttatgagggttgttttttgtacgtttattttcgagttttagttttaaagtagtgttgggtttattaggtttttttgtggacgtcgtttttgtttgtgcggtgggatgttaatagttttcgcgttatgtggttgttaattttggaagttcgttttttttttttttttttcgttatggttttgtttttatatttcgttgtttgagttagcgtttacggttgtattagatgttaggtttggttttagttgaggggttggtgtcgcgtacgtaggtagggggtttggtaatggggttatattatttgtatgaacggttttgttatttttttttgttttgtttagtataggttgagtttatagtttagatagtagtgtttcgagagttgtttggtatatttcgggaagaggatgaattttgtcgtatggggaggttttggtttcgagagttgtttggtatatttcgggaagagggtgaattttgtcgtatggggagtttttggtaggagtggggttgtttggtgatcgcgtgaagtatttttcgggatgaattagggttttgttaaagttgaggttgggtcgggatttttggggttttattgtttgggatgaggcgggttttagttgggttgcggtaggggttaggaggtatttgtatttgttttgatttttttttttatatttgtagagtttttttatttattgaaaagtagggtgttttgggtgggtttcggtttgagtatttagagatttagttttaagttaagttttttattttttttgagttttagtttttttatttttaaatgaagatgtttaaggagagtaggtttcgttttttagttggatttattagagtgtatagaggtgtttaggagagtaggtttcgttttttagttggatttattagagtgtatagaggtgtttaggcgagtaggtttcgttttttagttgggtttattagagtgttgttgtaggtttgaggttttatttgggtggtataatttgttggcggaggaaagagttgtcgtagtttaggtgggattggggggtttttatgattttttaggagggtgggggttttgtgtgggagttttttattagttttagacgcggtttttagggtatatttatttaaattttttatttttatttttttttaagtgtaggttcggtagtggtttttatttggggttgggagggggtaggtttttggtgtttatgggacgttattttatattgggtattggtttaggtgttaggggatagagtgggtattttagcgggttgtgtgggtgagggttttagtattgttttcgttttttattttgaaggttggagtagtttgggaagttgtattttaatgagtattttattttaatagagtgtttattgaagttcgagattacggttaggagggttagttagggttttaggggcgggatttaggtttttgtagaaggttttatttttgaaattttttgagggtttttttgtttttgtttggatttcgggttacgttttgtttttggtagttgtagtttgtattttattttagacgttttggtgggaagtttttgttgtcgggtttttaggttggaattcgtaggatgttagggtattttgtgtttttggggacgttttgcggtagttttttgaggtttttagatattaggatatttttttagtttagttttagtaatatatgtcggtagcgtttgcgttagtgttttttttttttgtcgggaggttggtgattcgttgtgttgtttcggtggggggttgatttttgattttttgtttggcgggttgtgttgtattagttagggtcgggaggtgtacgtggattcgtgtttattggaattttgttgtgattagattcgggggcgacgtcgagatttattaggtttcgtggttttttgtgaatatttgtaggttgttgggggtagcggtcgacggaataagtgtggggcggttcgggtttttcggaggaagcgttgtttgagttgttaggggagttatttgtagaaagggaggtggggtgtattaggtaggggggtagttagggtaaacgtttgatgtttagagggtgatagtgggtagcggggttttttggaggagcggagggagggttttgttggttgtagggtagagtgttttatattttttttggtcgttatttttagggtttagtttagtttggggattaagacgagaggtttttggggtgttttaggtgagttggagttagtttttgttgtttttgaataattataggggagttagtttagtgattaagtttttgtttggtgggggaggggtacgggttttgtgttcgggagttgttgtttttagttttaggagagggggtgttacgggtcgtgggataggttatagttagggtggggtttttggagaggggtttgaggatcgtttttgcggagtttatttagttattatcggttgttatggttattggtagtttttaatttttacggtgttgggtttgatttttgtagcgttttaggcgggtatgattttatttgatttttttggggtgggtgggattgaggttaggggatttttgtttagaatttagggtggtcgatgtggggaggggtattgtggggtcgataggttttttttttggttattaggtttttaggagggtttaggtgtttggaggtggggggtgttttagtttgatgttggggatgtgagtagatttagcgtttatttattcgtagggttgagtttttattgggcgttgggtcgtgattcgtatatcggattttgtatttttggggtatttagtgattttagaatagtgggattttagaggttttttagggagttttagaatatgatagatgggggtttaggtgcgaggtagtgggagttggaggaatatagttaggggttgaggcgagaattatgaggatggtgggtagaggttgaggggaggggtagtagatggagatgggggaggcgttaggggttataaagggggtttttagaggatttgttttgggaagttattgttgtgggagggtgggagggatatagtttaggtatttttagagaggatggaaaggtttatggggcggattttgggtaggggatttgggattagtttgtagttttttttgagggtttggttatggtcgtaggttggggaggaggggaggggattttggggttaggtgttatggttttttaagtatttttgttcgatggtaaatataatacgcgttgtttgtagaatatgtggaaatattgaaacgtttaaaggagagaatatggtttcggtattcggtttttaagggagttgttggcgtttgtttaataggagtcgattttatttgtgaatagacggtaggcggttgtttttatgtttttttagagaggggtttttcgagttttgttgttatttgggggcgttttattttatttagttagtggcggggttttttgggtcggtatagagttaggggagggggttgggggattttttggtgggaaaatgttcggtgatttttagttttcgcgtttagcgggaggaggcgttcggtttcgttttttataattagcggcgtttacggcgggttcggggattagtatttcgggagttttttaggaatgtagatttttaggtttttattgtttggggagtcg

SEQ ID NO: 132 - DNA, 22489 bp, Artificial Sequence
  chemically treated genomic DNA (Homo sapiens)
cgattttttaggtagtgagggtttgggaatttgtatttttgagaagttttcgggatgttgattttcgggttcgtcgtgagcgtcgttggttgtaagaagcgggatcgagcgttttttttcgttgagcgcggaggttggggattatcggatatttttttattaggaggttttttagtttttttttttgattttgtgtcgatttagggagtttcgttattggttgaatgaagtgaggcgtttttaggtgatagtagaattcggagggtttttttttgaggggatatgggagtagtcgtttgtcgtttgtttataggtggggtcggtttttgttgaataggcgttagtagtttttttgaaggtcgggtatcgggattatgtttttttttttaagcgttttagtgtttttatatgttttgtaagtagcgcgtgttatgtttattatcgagtaagagtgtttagaggattatggtatttggttttaaggttttttttttttttttttagtttgcggttatggttaggtttttaggggaggttgtaggttggttttaggttttttgtttagaattcgttttataagtttttttattttttttggaggtatttgggttgtattttttttatttttttatagtagtggttttttaaggtagattttttgagaattttttttgtgatttttaacgttttttttatttttatttgttgtttttttttttagtttttgtttattatttttatggttttcgttttagtttttggttgtgtttttttagtttttattgtttcgtatttgggtttttatttgttatgttttggggttttttgagaagtttttggggttttattgttttggaattattgggtgttttaggggtgtagggttcggtgtgcgagttacggtttagcgtttagtgggagtttagttttgcgggtgggtgggcgttggatttatttatatttttaatattaagttgggatattttttatttttaagtatttgggtttttttgggggtttgatggttagagaggggatttgtcggttttatagtgtttttttttatatcggttattttgagttttgggtaggagttttttggttttagttttatttattttaggaggattaaatgaggttatgttcgtttgggacgttgtagaggttaaatttagtatcgtgaggattaggggttgttagtagttatggtaatcgatggtggttggatggatttcgtagggacggtttttagatttttttttagggattttattttaattgtgatttgttttacggttcgtgatatttttttttttgaggttgaggatagtagttttcggatataaagttcgtgttttttttttattaggtagaggtttggttattgggttgatttttttgtaattatttaaaagtaataggggttgattttagtttatttggaatattttagaggtttttcgttttagtttttagattgggttgggttttgggggtggcggttaggaggagtgtggggtattttgttttgtagttaatagggtttttttttcgtttttttaaagggtttcgttgtttattgttattttttgagtattaggcgtttgttttggttgtttttttgtttggtgtattttatttttttttttgtaggtaatttttttggtagtttaagtaacgtttttttcgggaagttcgggtcgttttatatttgtttcgtcgatcgttgtttttaatagtttgtagatgtttataggaggttacggggtttggtgggtttcgacgtcgttttcgggtttgattatagtaggattttaataaatacgggtttacgtgtatttttcggttttggttggtgtagtatagttcgttagataggaggttagagattagttttttatcggggtagtatagcgggttattagtttttcgataggagaagaaaatattggcgtaggcgttgtcggtatgtgttgttgggattgggttgggagggtgttttggtgtttgagagttttagggagttatcgtagagcgtttttaagagtatagggtgttttgatattttgcggattttagtttggggattcggtagtaggggttttttattaaggcgtttggagtgagatgtaggttgtagttgttaagggtagagcgtggttcggggtttagatagaaatagggagatttttaaagggttttaaggatggggttttttgtaggggtttgagtttcgtttttggggttttggttgatttttttggtcgtggtttcgagttttagtgggtattttgttaaaatggggtgtttattaaaatgtagttttttaggttattttagtttttaggatgggaggcgggggtagtgttgaggtttttatttatataattcgttggggtgtttattttgttttttggtatttggattagtgtttagtgtggagtgacgttttatgagtattaaagatttgtttttttttagttttaggtagaagttattgtcgggtttgtatttgggggaaggtgaggatgaggaatttgagtgaatatgttttggaaatcgcgtttggagttggtgagagatttttatataagatttttatttttttgggggattatggggattttttagttttatttgggttacggtagttttttttttcgttagtaggttgtattatttaggtgaggttttaggtttgtagtagtattttgataggtttagttggggggcggggtttgttcgtttaggtatttttgtgtattttgataggtttagttggggggcggggtttgtttttttgggtatttttgtgtattttgataggtttagttggggggcggggtttgttttttttgggtatttttatttgaagatggggaaattgaggtttagagagggtaaagggtttggtttggagttgagtttttggatgtttaggtcggggtttatttaggatattttgttttttagtgagtggaggggttttgtaggtgtgaggagggagattagggtagatgtaggtattttttggtttttgtcgtagtttagttgggattcgttttattttagataatgaggttttaggagtttcggtttagttttagttttggtagggttttggtttatttcgggaggtgttttacgcggttattaggtagttttatttttgttaaaggttttttatacggtaagatttatttttttttcgggatgtgttaggtagttttcggggttaaagtttttttatacggtaagatttatttttttttcggggtgtgttaggtagttttcggggtattgttgtttgggttgtggatttagtttgtgttgggtagggtagggggaagtagtaaagtcgtttatgtagatggtatagttttattattaggttttttgtttgcgtgcgcgatattagttttttagttggggttaaatttagtatttggtgtagtcgtgggcgttgatttaggtagcggggtgtgaaggtaggattatagcggggggaggaggaagggggcgagtttttaaaattaatagttatatgacgcggagattattaatattttatcgtatagatagaggcggcgtttatagaggggtttggtgagtttagtattgttttagggttggggttcgggaatggacgtgtaaagggtagtttttatagttatatggatagtaaggagggtgttacggtataggtgtcgtgggataggttatagttagggtggggtttttggagaggggatcgaggattatttttgcggagttgttatggttttcggtatttattgagttttatagtggtgggtttgatttttgcggtgttttaggtggagattggatttattggatttttttggggtgggtgggattaaggttaggggatttttgtttagaatttagtgtggttgatggtgggaggggtattgtagggtcgataggttttttttttggttattagtttcgtaggaagttattgggggaggggttatagttaggattttgattttgtgtgatgttaaaggttgtcggtatttttgcgtgggagcggttattaattcgtttagagatagagggagttgggggtagttgtgtcgaacgtttattggttttagtggagatggcgttagttttacgaggttagagaagagatttagagttaggatttagatatggggttttagcgggggttatatataggggagagggtttagcggtagtaggtggggtgggagaattatatttattgtaaaattataattattttaaaaattataattatcgtaaaatttatagttataattatcgtaaaaatcgtaattataataaaaattacgattattataaaattataattttcgttagaagtacgttttttttatagtatttttatttagtatttttttttaataatttttattcgtagttttcgttgaatttaaaatagaggattttaatttttagtatggttcgggttttataggataggttagggtttagatgttttttatagagaggatttgggttttcggttggttttttttagattttttcgttggtaattttaattatttttaggtgtgtttgttacggggtatttttaggtgtgttttattattgtcgttaggggcgtttattaggtgcggtggtttgtttttgtattgttagaaaatatttacgatcgggcgtggtggtttacgtttgtaattttaatattgtgggaggttaaggcggggcgttgggggtagggggattatgaggttaagagttcgagattaatttggttaatatggtgaaatttcgtttttattaaaagtataaaaattagttaggtatggtggtatataattgtaattttagttatttaggaggttgaggtaggagaattattttaatttaggagtagagggtgtattgagttgagatcgttttattgtatttttttttgggcgatagagagagacgttgtttattttcgtttttattaaaataaataaataaataaataaaaaaaattttgagattgggtaatttatagagaaaagagtttgattggtttacgttttgtaggttatatggaaagtataggtgtttttgtttttggagaggttttaggaagtttttaatcgtggtggaaggcgaagcgggagtaggtgttttatatggcgtgagcgggaacgagaaagatagagtaggtgcgggatatagttaaatggttatttataatttcgaggatagtattaggagggacggggttaagttatttacgagaaattcgtttttgttatttagttattttttattaggttttatcgttatattgtagattttatttttatgtgaggtttgggtggggacgtagagtcgtattatattattatttaggaggatgtttaggagtaggcgtgtggggcgtttagggatgatacgttttacggggggattttgtttttaggggttagggtgtttgggaagaggttgggagtcggcgtggttgtggtttttttatttaggtattatagattagggttggtgggttttagggggtgtttatatttattattttgaattttatgtttttttttagggaaacgtgtagaggaaatggttggagagcgaagtttaggtataggggttatgagagtcggattttacgtagttgtagatttcgattcgaattgtatgcggttgaggatttttaagttaggtagatttcgatttagattttacgcggtcgcggattttcgatttcgatttaaattgtatgcggttgaggatttttaagttaggtagacgttaatttagattttacgcggtcgcggattttaatttagatagatttcgatttattcgtgtagtttttagttttagaagttaaattttagcgttttttagggcggttcgggtttttttagatatagtagttttttgaggtggttttatttgtaattttagattaattagagaaggttaaatgggttttttaagtttagtaggtgggattttcgatttagagagtttttttttcgttttaggttaatagttattttcgggtttcgtattaggtttgttaaatgtaggggcgaggggtcgatttcgttacgggaattaaatttaggaaatagtttatttagcgtttatttttattcggattcgtcgtcgcggtcgtaggtttacgcgtcgtttcgcggagattttttaggcgttttcggttcggtagaaattcgcggtttcgatggtagaggttttggtgggaatcgtatcgtttgtcgtttttgttttcgcggaggatgcgttgttttaaattgttttcggttttttattttttaattttcggtagttttcgattttttttcggtcggcgtagtttagtttttcgtagacgcgggggagttggaattcgattacgcgtagtttttttatcgtggtgtacgtttcgggttttttacgttttttttaggttttattatttatttttttttagcgttgaaggaaattttttagatgtttttttatttatttatcgaagtaggtttcggttgtttttagtttcgggttttttcgagaatattgtaagtttttattggttttttttcggtaattttacggtttatttttaatttgtatttattttgtggggtttttattttttggaggaaggacgtgttaaagtttggaggtgcgcggtttgtttaattttcgtttaaggcgcgcggtaggcgataggttttagttcggattagcgtggtttaaaaggatttatcgttaaaagtgttggttttagaatttaaggggaagatatgttggttttttgatgagttgggtcgttttttttaggaagttttttttttggagttttgtagttatcgtgggtttgtaagagttaaagggtttggtttatagcggcgttcggtattgagttggatagtgttttgtttttaaaatttatgttcgtttagaattttagaatgtaattttttttggtagtagggttttgtagatgtaattaaggatttggggacgaggttattttggattgaggttgagttttaagttagttattggtgtttttttatgaagagtagagtagaatagagatagatgtatagagtaggttttgtgaggatagaggtagggattggagcgtcggtcgtagtaggggcgtggagtttttagagttggaagagggagggattttttttagggttttcggaaggagtgtgttgcgtgttgtttatatcgtgattttggattcgtggtatttagaattgggagagaataaatttttgatgttgtaagtttgtattatagtagttttaggacgttgaaatagtttagtcggtgtaggttttttttttttttttttttttttgttgtgagatattttttagacggggttttatttgtcgttggagtgtagtggtgtgattatagtttattggagtttttaatgtttgggtttaagcgatttttttattttagtttttcgagtagttgggattataggtgttattagatttggttaatttttaaaaatttttttagagatgggggaggtttttttatgtggtttaggttggttttgaatttttgggtttaagtgattttttcgttttggttttttaaagtgttaggatggtaggtttgagttattacgtttggtagttttatttgtgttgatttttgaagttttttattttggttaattcggataggtttgttggggattttatttttttttggagattttgggatgtggttggatgtttaagtggtcggggttttttatagtttttagttttttagggcgggaggtaggttgtgttttcggtgggtattgatagtgaggttgaaatgtttgtattttatatttttatatttaggggtattttgttgttgatttatttaaagtttttttaagtcgtttaatttgttgtttagagggaaatgaaaagggagttattttttttgatttgtttgttttattaattttttaattaataaaaaagtgtattttgtttatcggatgtaaataggtttattttttttaatatgttgaaatatagtgatttattagttattttattttatttggaagttgaaagtttaatggcgtttggcgagaattttttattcgagaagagtcggtaataagttagtatgaacgtataggtggggcgtggttttgcgtgggtgtagaagcgtggcgttgggtgacgtacggaaacggggatttgtagcggttgggagtgtgaaggttgtggttacgacgtcggtttatcggtgattagtgtttatcggggtttgtttttttttagaggttatatttttatagatttaaatttagggtttttgttaggttggatcgtagatgtttcgttagggatgtaggtaggggatttgaatgaggcgtaaatttttcgttaaaggataagtacgttttcgtttaggtagttattgtttgttttttatagttgtagtcgttgtcgtttagtatggggggttacgtttggtatcgtgagtttagggggtttggagtttgttagttttaaagatagtaagatgtttttttaggcgtttaggttagcgacgggtattttttgtttattttatttatttttttgggtttttttttttttagacgtagttagtgtgtgtgttttggtggggtggggtttttgtttttggttattttatgagtttgattgtattttttttttttgttgattttttttaaatatttagtattttttttttttagtattaggcggggaggaattagttgggtttcggggttagttttgtttatagtattttttatggttatagtagcgttgggggatttgaggtttttatagtattttttacggatacggtagcgttggggggttcgaggtttttatagtattttttacggatacgatagtattgggagatttgaggtttcggagtattttttacggatacggtagcgttgggggatttgaggttttagagtttagggttgtttatggaattgggcgttaatttttcgggatttatatggtagaggttggcggggtagggaagttacgtgtaggttttcgaagtagatgttatttgtttttgattatgtttgcggttattttttgtaatttttgtgattttggtcgtttttgattataggaggtttggtttgggcgtgggaacggttaggagtgtggtgagtttatgttttggggtatagttattatagtttggttatttttttatggtagggatagtttcggggtgttgttttttggggtttgtttatagcggtgatttgtttattattgtttattggtatttattttttttttttatagtatttttttaatgacgggtgttttttggggttatttttaaattttttgtttgaagatttttgtttttgagttttttaggggtatttaatagagattcggttatttcgttgttttttacgaggatatattggttgtaggtaggtgatagaggtgtttaggtgttatatcgttgggcgttgatttttagatttagattatagaggttatagatacgttttttcggtttttacggtcgggttttgggagggatacggtggatgtcgatattattattgttgttgttttcggtttgggattagttttgggtttggtcggttttgagttattttttagttgtatatagcgtttgtttcgatttaattagtatttacggggtgattagaggtttcgagagtttagttagtgggtgttaggaagggtgcgaggttttaaggagttagggtcggagttgtagtcgggacgatttcgttagttatagtaaggacggtaggtagttggggtagtttttcggtttaagtattattttagatttatttatttcgtggtaggggtcggtggggaaattgtggttcggaggttaggggttttgtttatagttatcgtttgtgtgagtttttcggggttgttataataaagagttacgaattgggagttaaagttacggaaacgcgatttttttagttttggggtcgtaagtttgagatcgaggtgttcgtagggttatatttttttcgaagtttttaggggagggttttatcgtttcgtattgttagttattcgtggtgtttttgggttgtttttttttagtttttgtttttgacgttacgcgttcgatttttttttgttgttagtagtttttttataaggtgtcggtcgttgtttttgggatttttttcgttcgattttattttaattcgattatttataaagattttatttttagtgttcgtaggtattcggggttagggtttcgatatacgtttttggaggggtttaatttaatttattttattagtttttgagtgttggggtttgggatttaattttttcggttggtcgtagtgattattgggatatatggtttattagttagttttttttcggggtttaggttttagttttatttatttttttatgaggattatttggggttttagagaagggagaggtagttgattgtcggggagatggagtttcgggggaggggcggtgtttatttttatttgttaggttgttgggttttatggagggggtatttgagatttttttttaagagttaggttttttttttttagtagagttaggttttgaggggtagtcggagggtttaggtttgtgtttggttttagtagaattgtgtggttcgagtttgagaagtaatttatttgtacgttagttttgggagtttttttgttatttttggagatatttaagagttgttatttataattttattagggacggcggggttaggggtagttgttgatcgttgtttttgtagggcggggttgtggtaatattatatttgtttagggtttgcgaattcgttcgcgttgtttgaggagtggttatcgacggtattagatggaggttttttagttttttttttcgagtttcggtagtgagagtgggtgttgaaattttatttcgggttttaaaggatattggtcgattttcgcgtagaaagttataggttttgtcgtattttttttttgtggacgggtgtggatgtgttattatttgattgttttttgggagggttgggagttttattcgtttttgttttgttaaggtattgatcggttggaggcgcggaattcggtttggttgttggcggttcgatttggggatcggtttttcgaggtttgttttgtttagtttcgtttggggtatagggttttttaggtttcgggttgtggtgcggggttgttagataaatgtagtaatggtagtaaggagaatcggtatttttattgggttttttacgtttattatgtttgtttttttatgtggtttttcgatttttgtgagggaggtgaggttgtattataggtgaggatgtgggggattaaggtaggggtattttttatttatttttagttatgtagttgattggggtcgggttggggtttagatttaaagttgacgtcggtgtttgtattttcggggcgttgtttttgttattaggatacggatggggtattattggtagttagtgggcggggtgggggatatggagtttggttttaggatttagaggttatttaggttttagtaaaggtaaatatgtatttttcgtggggatatgtttttttggggtttgggttttatagaagaaatggttcgtaatggtgagtttatatttcgagggattggtagatacggtattattttttaatttttaatgttttattttttttttaaagagatgaagttttgttttgttatttaggttggaatatagtggtataattatagtttattgtagttttggatttttaggtttaagttatttttttgttttagttttttaagtagttgggattataggtagtgttattaagtttaataaacgttttttgtttttttgtagaaagagttttattagtttgtttaggttgtttttagtttttgggtttaagtagtttatttgtttcggttttttagagttttaagattacgggtgtgagttattgtatttagttaatagtattttaagaattagaaataataatagaataattaagagattataggttaggcgtggtggcgtacgtttgtaattttagtattttgggaggttgaggagggtagattatttgaggttaggagtttgagattagtttggttaataaggtgaaattttatgtttattaaaaatataaaaaattagcgggatatggtggtgggcgtttgtaattttagttatttgggaagttgaagtaggagaatggtttgaatttgggaggtggaggttgtagtgagttaagattacgttattgtattttagtttgggttatagagtgagaatttgttaaaaaaaaaaaaaaaagattatatatgagtttaaaatgattaaagagataaaagtagaaatgaaaaataatataatagtatgaaaaggatttagtagattagaaaaataattatataggatttttaatacgaggaatatggttgttggtataaaaattttagttgatggttttaatagtagattagatgtggttaaaagagaatatgggagttggaagatagttttgaggaagttatttagatgatgtttttttatatagtagtaggtaagagattgaaattaagttgtagaaaggttagtgtttttatattgaagatattttttaatttttgtttagaatatcggaaaaatgaatcgagatttagatttaataaagagggtgggagatattaggaaatatttatatattaaaaaaaaaataaaaaaaaatttttaattttaggttgagcgtagtggtttacgtttgtaattttagtattttttgtgaggttaaggtgggaggattatttgaggttaggagtttaagagattagtttggataatatagcgagattttaatttttataaaaaattaaaaaatttgtggggtatggtggtatatatttgtagttttagttattggggaggttgaggtgggaggattatttgagtttaggagtttgaggttgttttgaggcgtgatggtattattgtattttagtgtgggggatagagcgaggttttgttttaaaaatatgtttggtgtggtggtttacgtttgtaattttagtattttgggaggttgagataggtagattgtttgggttaggagtttaagattagtttgattaatatggtgaaattttatttttattgaaaatataaaaattagttaggcgtggtggtacgtgtttgtagttttagttatttgggaggttgaggtaggagagttttttgaattcgggaggcggagtttgtagtgagtcgagattatattattgtattttagttcgggtaatagagcgagatttcgtttgaaatataaaatttttttagttttgtgaagtgtgtaaagaggtttcggaagttcgtagatgagatgtaggtataaagtttgtttttatttttcgtttttagaatgttttggggattttggtgggtattggttagggttcgtgggggttttttggggtaggatgtagtttgggtgattgggttgaggtttttagtcgattttggggggttttaggtaggttggggtagacgggagggcgggggttggggaggtagtagtttttttttttgtggcgtggttgtgatttttttttttttatacgaagtagttaggatgcggtagtcgggggttcggggtttttacggggtaagtttaagtttagcgtcggtttttttgggattttttatagtttttgttatgattatgttacgtggatatgggatttttggttgaagagataaatggtagtattgattaggggtaggtagaggtcggatattgagtaggaagtgggggttgatgggagtcgggatttcgggtgggggaagggagggtttgttggtaaggttttttttattaggtcgtttttcgtgggttttgagcgtttttcgattagttttttaggggtttttattttgggatttttatgttttttatgaattgaatttgtttggattttatgtttggtgacgtttttatttttttttttttagttttagggtggggggattttgtttcgtttttgttcggattttgtcgggggaattaaatagggggatggggcgtggggtagaagggatagtagtaggggtttagggttattttagaaagtgggggtttttggaggggattagtttttttgttatttggcgggtgatatcggggtttttaggtataggtcgtttattgtttagcgtcggattttttagttttattatatttggtttttttttcgattaggtttcgattttggggattttcgaggaggggtttggatacgtcggggggggggttgtagtagtttttatcggacggtttttgcgtttgaatcgcggtgtcgggatcgtcggtttttggcgttttttggtgggtatagtgggttttgcgtgaggtcgggtttggtgggcggttttgaggttggagtttagtgatagttatagtgggttttgaattggggttggggtagaggtagcgagagtcggggtttttgtgttttacggtttggtagggattcgtttttagtagttttgttgtgcggttttggttggttagttagtttttttgagtttggtgttttcggtaatacggggttataatgacgttttttgtttattttgttaggtatttttaggaaagttttgtcgtgggttcgtttttaggtttgaatttgtttttcggggatttttggattggtaggttttgttttggtgtttttgatagttttgtttaggttaatttttttttggggatgggtattgttagttttacgggtttttagtgatagggataggagatagaaattttaggtagaaaaagatggggtttttgaggaattttatttttaagtttggaagtatagttttgagtgagaatacgtattttagtttttttgttttaatgttgttttttttaaaattattattgtttcgttttatttttattttgtatttataaaaatttttgattttattggtagagaatagagtaggtaaggagaggagaagtagttggttatcggagatggtagtttgatattagagaggagtagcgtgattttagagggatagttggatagtaggattttggagaagagtttggtagagacggtaggattttaggggattattattttttttttttattttttttttagtttttttttttattgagagttttttttattattttttttttttattttttttttagttttcgttttttgtgagagtttcgtttattattttttttttttattttttttttagtttttttttttttgatagttttttttattattttttttttttattttttttttagttttttttttttttgagagttttttttattattttttttttttattttttttttagttttttttttttttgagagttttttttattattttttttttttatttttttttttaggtttttttttttttatcggttataaaattttttgtatttattattttttaatttttttatgtaatttgatattttttggatgttggataagagtttgggatatagaaagttgttatattgattttttgttttcgagaaaaggtagagggtttattgagttgttaaatattttagatatttttggatagtaaagttaaaagtattgtaatatatattttttgaggttttacgggttataggtattgttttagatattgttataggattgtacggagttttgtttttgttgtgtttagaagtgtttattttagtttttgtattcgtttatttgcgtgtttttgttgtttcgaggggttgagagttttgggttaagtaagatatcgttgttattaggtttataaaggggttaaggaaaattttttgttttattggggtgtgcgtggtatggacgggagaggaggggtaatatagggttgtttttattaggttatttttttttttgtttttggggatttgttttagtgtcgttttttaggtagatgggtttggggttagggatttttttaaagtaggtaatttttagttcggttattttttgattttgggttttatggtcgggtttttaggtagggtttggttatttaaaagtagttttagtattttaattaatttttattttataaggttatagtttttatagtagttttagtacgtttcggttcgttgttttttgagtatttttgataaattttcgttttgtaagattatagtttttacggtagttttgtttattttttttcggtttggagtttagggtttttgtaataggttggggtttatggagagtggtttgtatttggtgtgttggggtgtggttgttaatatttggggcgtagttttattaaagtagggtgttcgtagtggtttttatattattacggggcgggtttttttgaggtttttttgttttatttttttttgtttttagaagcgttgagttcgagcgttttggggttttgttttgaatatattgtgtgtttttttttttttagttggtttttagagatttttggtagggtttgatttttaggattacggtcgtaagtaattttttggttttttttttttttttagttttgtaaattagttttttgattaaggagatttttagaattgttttttgattttgtaatttgagaggattatattatcgtgtagtttttatttcgggtttcggttttttgagttttaggatttcgtattagggtttgaagaattaggcggagtacggtcggcgttggttattggggggtatacgtgtagtttttaaggtttttagtagcgtcggtgttcggcgtttagttttgttaggtttaggttcgaggataggggttgggggttttatgtggggttttttttgttttgtggcgagggtttttttatgttaagattgaaatttttggtttttaggttaagatttagggtttagaattagtttagttgatttttttggtttggttgtagggtttagggaagttggattttgggggtgggattgggattttttcgttttttttagttttatttattttttgttggttttgttgtcggcgagtggttagttcggtcgttttatattttttagtagttggtgggcgattttttcggtagtaggatttgtttggttgggtcggttatatttgttgtagtagttggtttaaaatttttaaattttggtaagttgttcgtttggtttcgtatcggttaggttagcgtatttttggttcgtagggtttgtttgttttttgttgaatcggttgttggggatcgtggttaggtgggtaggcggatagtattttagtttggagatattagggttgtttatacgttaggttgtattgttttagttttttgtgtgtgtgggtgggggtggtatttcgtttgggttttgttggagtaatttagatgagagtttgtaggttttttaggagaaagaaaaatagagatatgggtgttggggtttgatttttattttattttttcgggtaggggagaaagtagggtgttatttttttgagggtaggcggtcgttggataggtttagtttttttgtttcggttagtttgttttaggttcgttaatttttttagtgtttattttcggtttatttttattgggattttcgggttagtggtagtttgggtaggttaggagggtgtgtaggttaggagggtgtgtaggttaggagggtgtgtaggttaggagggtgggtagtattaggagggtgggtaggattaggaggagcggggtttagttgttataggggttttttaagtcgttatttaattttggtttgagtttgttatttgatatttggttatttggttgtttttaggttttgggggaggtcgggttttcggttgtcggatgttgggagttagagttttaggagtagagaggcggtggtcgtcgtttatttagggtttaggtgggggtgttgttaaggtaggtggcgaaatcgtagttagtgttttttttcgtgggtgttcgtttattttcgtttttcggtatttgttgagtatttattgtgtgttgtcggttttttcgtgttgagatagatttagtaaggggtttgcggaaattgttttgtgtttagtacgtggtttttttttggttttttattgtttgcgtgcgggggttttttaagtatgtatttttttgggattttgttttgtttagtttgtatttgttgggtgtaggtggggttttttgttttgtttggggttagtgggaggggttggggtggttgtggttattaagtaggtattttgaggggagagtttgggtagtattagatggtgatattttggggttagcgttttgtatttagtaagatagtagtttttgcggagtgttgagtggatagaggtgggggttggttcgttttgtgtttaaggttgggtgggagagtattgtagtttcggtttattttagttgtttattttagtttggtgtttattttttgaaagttttttttgttggtatttgtagtcgaggtaattgatttttggtgggggtcgggttggtttgggttttggttttttttggttttcgagttttcggtttagttgttgttgaggaggttgcgtttgttttcggggttaatagttgtaggttcggaagcgttttttttttatattttttagagtaggtgtgttttttatagtttaatttagtttgttaaggatgggttttagggatacgggggttttttgtttttttttgtttaatttttcggggtttgggttgggattgttgttggagtttttagttttgtgggtagtagacgttaagtttttggtggttagtttgtggttaagtgggttgagtatttattgtagtttcgattaagagtagttgtgttttttagttacgtttattagatttaaagtgtacggtcgggtatatatttttttatttgttttattgtttaggttcggcgggggttttttcgatgttatttttttttttttaggtttcgatatttatattgtttttattgatttgagagtttgtgttatagtgtttttagcgtggtaggagagggatgtttgagttatggtagttattggtgatttcgtgttagttgggtgatagttgaattttaggttagtttttggtagtttatttgtagtgtttttggcgggtatttagttttgtttggtttaattttatgttatgttatgaggttgattaattttttagtagtcggtggttatagcggagggtgtttgagattttaaattggggatttattttgtggatatttttttttttttattatagttgtgggtattatgtttttttttttgttttttttcgtttatgggttttgatattttttttttgttttgttttttttgttgtttgttggatttattattgtttttagtttttgagtttttttttggttttggaattttttttagtttgttattagggtttagtatatttgttttagggatggggtgtagtttttattttgattagatttcggtataggagattttaggttagggatttttttagggaagtaattggagttttcgttttatggtggaggggttaggtttcgggggatttgttaggggtaagtgttagttagattgtgtgttcgggatagttgttttgttatagttggtttttgttttgggttgaacggtgttttttagatttatatttatttagaattttagcgtgtgattttatacggagatggtatttttgtaaatttatttatttatttattgagatggagttttattttgttgttttggttggagtgtaatggcgttattttagtttattgtaattttcgttttttaggtttaattgatttttttgttttagttttttgagtagttgggattataggcgtttgttattacgttcggttattttttgtatttttagtagagatagggtttcgttatgttggtcgggttggttttgaatttttgattttaggtgatttgtttgttttagttttttaaagtgttgggattataggtatgagttatcgagtttggttatttttgtaaatttaattagttaagatgaggttatgtaggattacggtgaaagggtttttgtgagaaaaggaaaagaggagaatgggtagggtttttagggaggtgtcgggttcggggacgttagggtttagggggttaataggttttggttatgtttttatggtagagttagagaagatgacgaggttatggtttttgtatttttaatatttaaattttcgtttttacgtttagatttcggggggtcgatttttggtgtagagaggtgtttttttaggaaagcgtagagggggtcggcgtggtttttaggtgtggggagggcggtatattcgagacgtggatgtaggatttagagcgggagttttggggaagtaggaagatttttgttttttttggggtagggtcgtttatcggttaggtggtttgggtatagaagtgggtgggtttggtgggttttgatgtaaagggttggagggagtgtagggttcgattagcgatgtttgttttgggtatacggaggagtggggttttatgtgttatggttagttgagagggagaaggttttgtcgggaaatttttaaaggtttttcgtagttagttcgagttgaggttgtataggggttttagagttagtattaggttagttttagacgtcgggattagaaggggttgtagggtttggtttttaagatttgtgttttttattgacggtttggtagttgggaaagagaagggagaaattttttttttaatttttttagtttggttttttttcgattttagggatagagtttcgggttagacgtgaattagtggttttattaaattttttatatttgagtttgcgatttttttcgtttatttcgtattagatttattagttatttttgttttagcgacggatattttgtcgatatcgggtttcggggtttttgcgaagtgttaagtggttttgcgtaggtgatttatttgggtttattttttttagggtttttaagtatttgatgattttatttggatggagtattttgtaggtcgtttgtattttttattttaggaattttttatttttgagagcgacgggagaggtggatgtttattttatcgtttttttttgtgtaggagtttaataatttagtagtcgggtcgaggcggcgacgcgtagggtcgtttgtgttttcggaattttttttttttttaggttttatgtgtacgcgtcggttggttgcggatcgtgttttttttcgaaagaagtggttttgttattaagtttagtgtttcgtttagatcgttttattagttttcgttgttgggtttagttgttcggggatagcggttgtttttgtcgggtcggtttcgaaacgtttgtttgaggtttagtttaggtgtttaggttagtgttcggggtagggtatttttagataaagtttgagtttacgtcggttttataggtattttatttgttttaggggtcgattttcggtcggttgttatagttttttggttagcgaggtttattttggttagttggtattttaaggttttgaagaagagcgagtatttgttaagtatcgattgtttgttgttcgtggattcgttttttttttaaacgggacgtttttggttttttttttgtagagggcgaggtgttgagagttggtgtttatttattaagttttggtgtatttttaggttttagacggcgttgaaggtattgttcggaggtatcgttttgttttttgtattattttgggggcgaaggtgtgcgtgttttattttttaggtgaggaaaatgaggtttggggagttgagcgtttgttcgtaggtttagagatggtagttcggtttatggtagtttggtcgttatcgggaattatggttttgttttgttttgttttgttttgtattttttttgagagtttcgggtttttttcggcgttgggtaggtttgttattttttagtagtagttttagtagaagagtagagtttttatcgggtttttttagggttgtttttaggggtaggatttgagtttttaggggttttcggggggttatttttttagttgtgttttttttttgtaggatggggataggggtttagtatagtatttagtgggaggttgtttcgatagtttagggtacggtagggtttttatacgtatgggttgtagggtggttgtttttagagttgttgggttaggtagagatgaaggggtagtgaggttagtttttgagggtgggggcggttattgtttatgtttttattggtttttttttttgttatttgaggtggtcggagatttggggataagtgttcgagtttttcgttttattgattatagtgttttttagcggtt

SEQ ID NO: 133 - DNA, 4419 bp, Artificial Sequence
  chemically treated genomic DNA (Homo sapiens)
tgtgtcgtgcgggtagggagtagtttttttcggtcgtcgaggcgtttttaatttggttggagagataagtgtattataagaaatagaggtagttaagcgtttgggttattattaagtaaggttgaaaaggggagggtaggtagatcgggattcgtgggcgttaattaatgttatggtggcggagagtaaaggggacgaatatagtttggggttattttcggagttttttagcgttcgtttgtggtcgtgtttggttggtcgcggatttcggcgggcgtcgtaaagcggcgggattgttagcgtagagtttcggttttttgttttgtttttgggttcgagtatcggagtttttggtgtttgcggggagaagtttcggattgagaaatacgggagggtttcgttagtggttgtaggtgcggtagttattttggggatttagtgagaatggggtcgtttggttttgcgcgaattttttacgtgggtgtagtttttgagtcgtcgagggaggcggtggtaatgtcgtttagtgttagtagagggtagtttcgaggtcgtgagttcgaacggcgatttcgttaaatcgcgggtttttttttagttttcggattttgcggggtagaggcggttttggagtttagagattagcgattttagtttgtaggagttcggcgtagaggtttaagggtattttcgggatgtggttaagttatagtttttaggtagttttattttgcgacggtaagggtttagagggtggagggggattagatgttttaggaggggttagaaagttaacgtatatagggaatttgtttttaagtaatagattttaagtatgtggaaattttttaaatgatgttggtgagagttatgatagttttcgtatttttggcgagggaagtcggaggttagtagcgggatggtttttgggcgcgcgggagatagagggattagcgatttttgttgggggtagagggattgtggattaaggatttagatatatttaattggggattttagtttcgattgtggttatttaattggcgttgaatttgagtaatttattatatcgttttagttttcgattaattatttttgtaaaatgggtattgtgggtttcgagtttcgtaagggcgttagggattcgagatagtaggaatttttttattgttttagtaattttgggtttttgggtttgtaggtgggttgaaaggatttttttatcgtacgtttgtttggcgtggttgttttagagatcgaggttcgttaggttttgtaatttagttgcgcgtggttagttatggttttggaatcgtcgggatcgttttagcggtatttcggttagttttcgatttttcgttttgggtattagggttatttagttttagaagatagtgtttattagtataggaattgagattttatattcggcgtagtgggttttttaggaagtttggcgaagagttaaggttcgtcggatttgaggtcgtttggggcgttaaatagatttatttatgagtatattcggttaatatatttaagtttaatagtgggcgggatttttggttggtttcgattttttttatagtgtgtgtaaacgggtatttattagattttttttgtttgtttttttatttgtaaattttgaaaggagagtatttttcggggtgattttgaaaattatgttagaattgaaaaggtttgtgtaaatgcgaggtgtaatgatgatttattagaagtagttagttttgtacgtgtttgtaggatagatgttagaacgttttataaatgtgtgtatatatatattacgtatgtgtgaaggtgtatatttgtttttagatatttgataaatgtatatacgtatgcgtgtatttttggttgagagtaaaggggttaatatagggtttatataggatattattttgtagttttgtgcgtgtatagtatatacgcgagtacgattgtttgtgtttggagatatcgtatggtatcggaggagttgtttagtcgtcggtgttatttgggaagtagggtttcgggtgttgttttggagcgcgggaaagttcggattcgggtttgttggttagcgtttcggcgtcgtcgggtttttttattttttattcgtcggtcggtgagcggttttagttttaagattttcgattttgtcggtgaggggagggagcgagaaggagtgcgtttcgggtttaagaggttgtagggttttattttttaggtttgtcgttttttttttatttttttaggttatatttttatttaaaataaagaagggtgtttgatttatttaggttagggaagtcggttttcgggagttttttgtttttataagttatggtgaagggaggcgaagttagggtttgttacggtttgggagaaaatgcggttgtagggtttttttgggttgtagcgttggttcggggttttaagattgttaaggtgtgtgtgggaggcgcgtagtgtggttatcgaagagttttttattatcgtatcggtaggtcgtcgggttcgttttttttttatgtttttaagggttttgagttgcgtagtattcgtattatttagaagtgtttgtggagaaaacgattttaggtgtaagtttaaggttgttgtttgtaaaggtaatgtcgtggagattgggttttatagcgatttgggtttttaagttatcgaaagttatagggtagggttataaatattttttcgttttttttgtagaatcgtgcggttgataggagagcgttgcgtagaaaattcgaggtcgggcgttggaggagttttcgcggttcggagaaggtatagaggcgtttttgagaggcgtagttggaataggcgatgtacgggttcggatttggtcggttaatcgagtttagcggtcgcgaaaattagagtcgttatagaggttgagtacgattttatttttggggatcgggttcggtggggagttattgtttttaacgtttttagagattttaagtaggataatataatgttggtaggagtaaggtgtaaggaatttagcggtagaagtttttcgggggggtggggaaaggtagattcgtgtttcgtttgagtttgggggtggggatagtttttggttttgtagtttttgtttcggggattagttgggtttatttaatttttttatatggggttgaaaggggttaatgggacggtttcgtcgtttttttttcgggattttatagggttttgattcggtttttatttttgtacggttagtagtcgcgggggttttaggaaggaggataaaggttcggtgttatcgcgggcgggggttcggttttttggttttttgtttatatttatagtttttagcggttgttgggggaagatttttaaaaatatgtgtcgaatttttttttttttttttttagaaataaataaataaaaaaggtaaaaggcgaatttttttttatttttcgtttatagagattaaagttttttgggattttgttttttttttttttttgattgtttagaaatatttgtttttttttgtatatagaggaaaatgcggggaaaggttttttaaaattcggttttatattattattattattaaggataatcgggtaggttgaggttttaacgtggatgattcgagttggtttcgcgtcggggttttgtagttattgttttgtgcgtttagtatttttgggggcgattagggtttttgcgttttcgttcgtcgttcggtagtcgagagtattttgtgtttagattggtcgatttattttttttcgaattttgtttagagttggtaagggggatttagttcgcgttttaagatttgggtttgtagcgtcgttaataggttcggggatacgaggcgttttaggtcggggttttttcggttgttggtttttttcgttttttattcgttggcggcgtttcggtcgttcgtaattgatttaattcgttttttgcgtttgttttttaggtttttcgtttttttataaaggtttaggggagtttcgtttataggttgattttgtaatttttggttcggtggttattttttgtttttttgaaaaagaaaaggaaaaaaaaaaaaaaaaagaaaaaattaattagtcgagggaggcgcgtgaggattggaggcgttagtcggatagtttatgagtaggtttttgggtcggtgtcgtttcgcgggttagtacggttttttttagagaaaattttttaaacgtgtgaagatcgttttgggggaagcgagagggaggttggaggagtttcgggcggggttttagcgtttattagttgtgtttttagggtttgggtgttcgttgtaacggtaatcgcgtgagttttatttttacggttaaggggttagggtagggtggatgtaatcgcgtgcgtttggtttcggaaggtgttcgtagg

SEQ ID NO: 134 - DNA, 4419 bp, Artificial Sequence
  chemically treated genomic DNA (Homo sapiens)
tttgcgagtatttttcggggttaggcgtacgcgattgtatttattttgttttagttttttggtcgtgggagtgaggtttacgcggttgtcgttgtagcgaatatttaagttttgaaggtatagttggtgggcgttgagatttcgttcggggtttttttaatttttttttcgttttttttaaagcggtttttatacgtttaggaggttttttttgagaaaggtcgtgttgattcgcgaagcggtatcgatttagggatttatttataggttgttcggttggcgtttttagtttttacgcgtttttttcgattggttgatttttttttttttttttttttttttttttttttttttagaaaagtagaaggtagttatcgggttagaggttgtagggttagtttgtgggcgaggtttttttaggtttttgtggagaaacgggaaatttgaggggtaaacgtaggaagcgggttgggttaattgcgggcgatcgaggcgtcgttagcgggtggggagcgagaggggttagtagtcgggaagatttcggtttggagcgtttcgtgttttcgggtttgttggcggcgttgtaagtttaggttttggggcgcgagttaagttttttttgttagttttaaataaaattcgggggagaatgagtcggttagtttgggtatagggtgttttcgattgtcgggcggcgggcggaagcgtaggggttttgatcgtttttagaggtgttgagcgtatagggtagtggttgtagagtttcggcgcgaggttaattcggattatttacgttgggattttagtttgttcggttgtttttagtaataataatagtatgaaatcgagttttaaaaaattttttttcgtatttttttttatgtataagggagaataagtatttttaggtagttaaagaaaaaaaaagggtaggattttaggaaattttaatttttatggacgaggagtgaaggggaattcgttttttgttttttttgtttgtttgtttttagaagagaaaaaaaggaaattcgatatatatttttaaaaatttttttttaataatcgttaaaggttgtgagtgtgagtagagagttaggaaatcgagttttcgttcgcggtgatatcgggtttttgtttttttttttgaagttttcgcgattgttgatcgtgtagagataaaggtcgggttagggttttgtggaatttcgagggaggggcggcggggtcgttttattggttttttttaattttatgtaggggggttaggtgggtttagttgattttcggaataggggttataaggttaggggttgtttttatttttaggtttagacgaggtacggatttgtttttttttattttttcgaaaggtttttgtcgttaaattttttgtattttgtttttattagtattatattgttttatttaaagtttttggaggcgttagggatagtggttttttatcggattcgatttttagaaatggaatcgtgtttaatttttgtggcgattttggttttcgcgatcgttgggttcggttggtcggttagattcgaattcgtgtatcgtttgttttagttgcgttttttaggggcgtttttgtgtttttttcgggtcgcggagatttttttagcgttcggtttcgaattttttgcgtaacgtttttttgttagtcgtacggttttgtagagaaggcgggagagtgtttgtgattttgttttgtagttttcggtgatttaaaaatttaggtcgttgtggaatttagtttttacggtattgtttttgtaggtagtagttttgggtttatatttgaggtcgttttttttatagatatttttgggtgatgcgagtgttgcgtagtttagaatttttggaagtatgagaggaggacgagttcggcggtttgtcggtgcggtgatggagggtttttcggtagttatattgcgcgttttttatatatattttaatagttttggggtttcgggttagcgttgtagtttaaagagattttgtagtcgtatttttttttaggtcgtggtaaattttggtttcgtttttttttattatggtttgtgagggtaggaggttttcgggggtcgatttttttgatttgaatgagttaggtatttttttttattttaagtgggggtgtgatttgaggagataaaggaaggacgatagatttggggagtggggttttgtagttttttgggttcggagcgtattttttttcgttttttttttttatcggtaggatcgggggttttgaaattggagtcgtttatcggtcggcggatgagagataaaggagttcggcggcgtcgaagcgttgattagtagattcggattcggattttttcgcgttttagagtagtattcgaaattttattttttaggtggtatcgacggttgagtagttttttcggtgttatacggtgtttttaggtatagatagtcgtgttcgcgtgtgtattgtgtacgtataagattgtaggatgatgttttgtatgagttttgtattagtttttttgtttttagttagaggtatacgtatacgtgtgtgtatttgttaagtgtttagggataggtgtgtatttttatatatacgtgatgtgtatgtgtatatatttgtagaacgttttagtatttattttataggtacgtatagggttggttgtttttaataagttattattatatttcgtatttatataggtttttttagttttggtatgatttttagaattatttcgggaaatattttttttttaaagtttatagatgaggaaataagtaaaaagaatttaatgggtattcgtttgtatatattgtgagagagatcgaggttagttaaagatttcgtttattgttgaatttgggtgtgttggtcgaatgtgtttatagatgggtttgtttagcgttttaggcgattttaggttcggcgggttttggtttttcgttaggttttttgggagatttattgcgtcgggtgtggggttttaatttttgtgttgataagtattattttttggagttgggtgattttagtgtttagggcgggaagtcgggagttggtcggagtgtcgttgaggcgatttcggcggttttaaggttatggttgattacgcgtaattgggttgtaaagtttggcgggtttcggtttttaaagtagttacgttaggtaaacgtgcgatgaaaggatttttttagtttatttataaatttaggaatttagggttgttggagtagtgaggaaatttttgttgtttcgaatttttagcgtttttacgagattcggagtttataatgtttattttatagaagtgattagtcggaggttagagcggtatagtgagttgtttaagtttaacgttagttgagtggttatagtcgggattggaatttttaattaagtgtgtttggatttttggtttatagtttttttgtttttagtaaggatcgttggtttttttgtttttcgcgcgtttaggagttatttcgttattagttttcgatttttttcgttaagaatgcgaaaattattatagtttttattagtattatttaaaaggtttttatatgtttggaatttgttgtttgaaaataaattttttgtgtgcgttggttttttaattttttttaaggtatttggtttttttttattttttaagtttttgtcgtcgtagagtgaggttgtttaagggttgtagtttgattatatttcgggggtgtttttgggtttttgcgtcgggtttttgtagattgaggtcgttggtttttgggttttaaggtcgtttttatttcgtagaattcgggagttggaagggagttcgcggtttggcgaggtcgtcgttcgggtttacggtttcgaggttgttttttgttggtattgggcgatattattatcgtttttttcggcggtttaggagttgtatttacgtgaggggttcgcgtagagttaggcgattttatttttattgggtttttagagtggttgtcgtatttgtagttattgacgagattttttcgtattttttaattcgagattttttttcgtagatattagaggtttcggtgttcggatttagggataaggtagagagtcggagttttgcgttggtaatttcgtcgttttgcggcgttcgtcgggattcgcggttaattaggtacggttataggcggacgttgggggatttcggggatggttttaggttgtgttcgttttttttatttttcgttattatagtattgattggcgtttacgggtttcgatttatttgtttttttttttttaattttatttgatggtggtttaggcgtttggttgtttttgttttttgtagtgtatttgtttttttaattaaattaagagcgtttcgacgatcggaaggggttgttttttattcgtacggtata

SEQ ID NO: 135 - DNA, 1918 bp, Artificial Sequence
  chemically treated genomic DNA (Homo sapiens)
tatcggatatgattatcgtatataatatagaagatattaagggttaagtaatgatgtataaacggggtttattgtttaaatttatagaaagtaaaacgtggaaaattagtaattttaattgatagtgtatatttaaagaatttatatcggtcgggcgcggtggtttacgtttgtaattttagtattttgggaggtcgaggcgggaggattatttgaggttaagagatcgagattagtttgattaatatggtgaaatttcgtttttattgaaaatataaaaaaattagttaggcgtggtggtatatgtttgtagttttagttattcgggagggtgaggtaggagaattgtttgaatttaggagatagaggttgtagtgagtcgagatcgcgttattgtattcgtttgggagatagagcgagatttcgttttaaaataaaaaataaataaaaagaatttatttaatagaattaagtattaatataataaatacgaagaattttagatttttggtttttaaaaaatatataaagatgatatttttttaaaatatttttataaaatatattgagattgtgatgttttatattgattgtatgaaaataatgaaaaagaattagtattgttttattataaaagttttattaatgtaaatttataaatttttttttaaatattttgagttaattttaattttatgatagaaatttattatttttagtaaaaatagttggtatttgggaaattaaaggtttaaaaattaagaatagtaattaaagaaatttgataaaatagtttttttaaaatttttatttatattataaggggaaattttgattacgtttttttttttttattaatcgtagaatttaatattaaggattatataattttatattttttttcgagaaaaagtaaaggttttgtgttgtagtaataacgtaagatatggagggaagttttatttaagatttttttgtttgttttttttttaaagttattttagaatattagggagggttgagaggtaaggtatgaagggcgtaatatttaatatgagtaacgcgtgtgatgtatttggttaaaatgtatatagaggatttgtttttgtttttagatagaagtttttcgttttgtagttatgagggttaattgttgaggttttatagttttttttttttttatattcggatcgttacgttttttatttattatttcgatgtagaggtagatttaggatttttgtatttgttaaggatttttcggtaagtttacggggcgggagtggttataagacggagttcgtttggttttggttttttcggtttatataagtttgttttttttttaatttttaatttttatagttttttatttttttattttcgatttattttgcgttatcgacgtttttggttttcgtttgtagtaagtttatttttattattatttttcgtataaaagtttgtatttattaggttaaagaggggaattaacgtttgtaggaatcgttttatcgaatcgtttggtcgcgttttttgttagattttatttgtcgttgcggatcgtatataattattttcggtatgtttcgcgtacgtattattttttttatttcgtttttttttcgtttaaatacgtgattttttttcgttttcgtttacgtttattttcgtttttttatttttttttaggaaggaggagggagttgggggtgttaaaagcgtagcgatttttttttttttttcgttttcgtttttgtatttttcgttataatgtttttcgggtcgttagcgtttcgacgttttttgggaaaatagtttatttttttttttttttttttttttgtttttaattaattagttattcgttagagagggatatgcgtagtgagtgtttttcgttttttttattcgaatt

SEQ ID NO: 136 - DNA, 1918 bp, Artificial Sequence
  chemically treated genomic DNA (Homo sapiens)
ggttcgggtagaagagacgggaggtatttattgcgtatgtttttttttgacgggtggttggttggttgaaggtaggaggagggggaggggaggaaatgagttatttttttagaaggcgtcgaggcgttagcgattcggaagatattgtagcgggaggtataggagcgggggcggggaggaggaggaagtcgttacgtttttaatatttttagttttttttttttttttaagggaaagtggaggaacggaagtgggcgtggacggagacgaaaggaggttacgtgtttgggcgggagaggggcggggtgggagaggtagtgcgtgcgcggggtatgtcgggagtggttgtgtacggttcgtagcggtaggtgaagtttagtagaggacgcggttaggcgattcggtgaagcgatttttgtaggcgttggtttttttttttgatttggtaaatgtaggtttttatgcgagaggtaatggtgggggtaaatttgttgtaaacgaaggttaggggcgtcggtggcgtaaggtgaatcgaaagtgggaggatggaaggttgtggagattgggaattgggaagggggtaggtttgtataggtcgggaaggttaggattaggcgagtttcgttttgtggttattttcgtttcgtgagtttgtcgaggaatttttgataagtgtagggattttgagtttatttttgtatcggggtagtaggtgaggagcgtgacggttcgagtgtaagagagaagggaattgtgaagttttagtaattgatttttatgattgtaggacggaggatttttatttagggatagagataagttttttgtatgtattttgattagatgtattatacgcgttgtttatattggatattgcgttttttatgttttattttttaattttttttggtattttggagtggttttggggaaggagtaggtagggaagttttgagtggagtttttttttatgttttgcgttgttgttataatataaagtttttgttttttttcggagagggatgtgggattgtgtagtttttaatgttgagttttacgattgatgaaggagaagggacgtgattaaagtttttttttatagtgtagatgagagttttaaaaggattgttttgttaagtttttttggttattatttttagtttttgagtttttggttttttaaatgttagttgtttttgttgaaaataatgaatttttattataaaattagaattaatttaaaatatttaagaaaggatttataaatttatattagtaaagtttttatagtgaaatagtgttggtttttttttattgtttttatataattaatataaagtattatagttttaatatgttttgtaaagatattttgaaggaatattatttttgtatgttttttaaaaattaagaatttaaaatttttcgtatttattatgttggtatttaattttgttgggtgggttttttttgtttgttttttgttttgagacggagtttcgttttgttttttagacgagtgtagtggcgcgatttcggtttattgtaatttttgttttttgggtttaagtagtttttttgttttattttttcgagtagttgaaattataggtatgtgttattacgtttggttaatttttttgtgtttttagtagggacggggttttattatgttggttaggttggtttcgattttttgattttaaatgattttttcgtttcggttttttaaagtgttgggattataggcgtgagttatcgcgttcggtcggtgtaggttttttaggtgtatattattagttaaagttattaattttttacgttttgttttttgtaagtttgggtagtggatttcgtttatgtattattgtttagtttttagtattttttgtattgtgtacggtaattatgttcgatg

SEQ ID NO: 137 - DNA, 13670 bp, Artificial Sequence
  chemically treated genomic DNA (Homo sapiens)
agtgttgggattatacgagtgagttattacgttcggtttgggtttttgtttgtttgtttttaagatacggttttgttttgtttttaggttggagtgtagtggtatgattatagtttattgtagttttgattttataagtttaagcgatttttttattttagttttttgaggagttaggattataggtatacgtttttatgtttagtagttaaatttttttttttttttttaagagataaggggttttgtaatgtttttaaggttggttttaaaatttttggtttgtcgtgatttttttttttcggttttttaaagtgttgggattgaaggtatgaattattacgtttgttttttagtagtttgtgacgttaggaattatatttttattttttgacgttttttttttttttattgttggggtattatttttgtttggtttattttttatttttttttttttttttttttttgagatggagtttagttttgttatttaggttgtagtgtagtggtgtgattttggtttattataatttttatttttcgggtttaagcgatttttttgttttagtttttcgagtagttgggattataggcgtttattattacgtttggttaatatttgtatttttagtagagacggggtttcgttgtgttggataggtttgttttaaatttttgatttcgtgtttttttcgtttcggttttttaaagtgttgggattataggtgtgagttattgtgtttagattttttttttgagatggagtttttttttttcgtttaggttggagtgtagtggtatgattttggtttattgtaatttttgtttttcgggtttaagtgatttttttgttttagtttttcgagtagttgggattataggtatgtgttattatgttcggttaattttttgtaattttggtagaggtggggttttattatgttagttaggacggtttcgattttttgattttgtgatttgttcgtttcggttttttaaagtgttgggattataggcgtgagttatcgtgtttggttttattttttatttttgtggttttttttttttgtttgtttttgaggtgttgggggtttttagggtttagtttttagttttgttttttattttgttttagggagattttattttcgtttttagtttaagagtttttttgttttataatatatcgatgtttgttgggttatttttgtttttagtttataatatgtttttaagtttttatttcgggatttagcgtcgttagattgaatatattttaaatttgtttttgtatttttttagcgtatttgttttttttttagtgtttggatttgagtttcgttttttattgtttggattacgtttatttttttttgaggttttttcgttttttggttcggtttttttattattttttaagtaatattttagatatacggatttgttcgagatttttttttgttggtatgtgaagttttttatagttttacgtttttttagtttaaattttttttttagttttacggaaatgttaaattatttcggcgtgggaggtttttgtgggtcggggcgtagttttgtaaggtttagttttaagattgttttttttagggagttttttttttttttttttaggtaagtgtttttttttagttgtttattttattagggtttgattatattttgttggtagtgttagagttcggttttgttttttattattttttttagaattggtggtagggatagatgaatggatgaatgaatgaatgggaagtgagaattttattattggattattaatgtagttttcggaatgagtgagtgagtgagtgagtgagtgagtgagtgatggaaagtggtttggaggtagggagagggataggtcgattatgcgaggaattttagtttaagttttcgaggttttcgttttcgttttaaaagatgtacgcgttaagtttttgggttagaaaaaaaaaaaaaaaacgggtcgggattggtttaggttgggggaggcgggtttacgacgagatacgattttttattggtttattcgttaggattttgtttaatcgacgcgatcgttttttttagaagattttcgtttttttttcgtcggcggtcgcggaggcggaagaaggcgttttttcgtcgttttagtaatcgttagcggattttcgtcgttcgggtaattgttttaggtttttcgttagtttttgtttgggttttttcggttattcggataatcgttattcgtttcggttaattattaattcgtttttcgttatttcggtaattatcgtcggatttatttatttttggacgtcgttttggttttgttcgtaggttttttcgttttaaattttcgtcgcgggtttcgacgttcgcgattttacgttttaggggtttttttttttttttgttcgttttttcgttttttcggggcggggggtattgttttttttttggtaggggggtttcgggttggattcggttttgggggtttttgttcggtcgggatagtgggatcgttttgtgttgtggtcgcgcgtagtttttcgtaggtttcggcgttcgtatttttgcgtgggattgtttaatcgttatagggagttttttaaaatgtaagttatgttttttttttgttgaaaatttttttttggttttttttgagaatcgaatttaagtttttcgtagtttttggcgatttggttgtgtggttttttttttgaagttttttcgtttattttgttttagtaaggttttggtttgcgtgttgtaattttaatgatttaagttttttttcgtttgggatttttttagttattattttttattttattaaaaagtgtattttagacgggcgcggtggtttatgtttggaattttagtattttgggaggtcgaggtgggaggattatttgagtcgaggagtttgagattattttgggtagtatagtgagacgtttgtttttataaaaaatttttgggaggtcgaggtaggcggattgtttgaggttaggcgttggagattagtttggttaatatggtgaaatttcgtttttgttaaaattataaaaattagttaggtgtggtggcgtgtgtttgtaattttagttattggggaggttgaggtaggagaattatttgaatttaggaggtggaagttgtagtgagttgagatggcgttattgtattttcgtttgggtaatagagtaagtttttatttttaaaaaaaaaattaaaaattagtttggtatggtggtgtgtttttatagttttagttatttaggaagttgaagtaggaggattgattgagtttaggaggtagaggttgttgtgagtttacgttatattattgtattttagtttgggtaatagagtgagattttgttttaaaataataataaataagtgtattttttagttagggttttatttgtgagtttttagtgaagttttttttgagttttgttagtttttttttttttaaattttttttggtttatattttgttattaggatttagaatattgtttggtatttatgttgagtaaaaagatgttgtgttaggcgtagtggtttacgtttgtagttttagtattttgggaggtcgaggtgggcggataatgaggttaggaattcgagattagtttggttaatatggtgaaattttatttttattaaaaatataaaaatgggttaggtgcggtggtttacgtttgtagttttagtattttgggaggtcgagacgggtgaattatgaggttaggagatcgagattattttggttaatacggtgaaattttgtttttattaaaaatataaaaaattagtcgggcgtggtggtgggcgtttgtagttttagttattcgggaggttgaggtaggaaaatggtgtgaattcgggaggcggagtttgtagtgagtcgagatcgtattattgtattttattttgggatagagcgagatttcgttttaaaaaaaaaaaaaaaaaaaaaaaatataaaaatgagttgggtgtggtggcggatatttgtaattttagttgtttaggaggtagagataggagaatcgtttgagtttgggagggggttgtagtgagtcgagatcgcgtaattgtattttagtttgggcgatagagtaagattttattttataaataaataaataaaaaaaggatattgtgttggggataagggaggatagagggggatgattagtaggtaggtttattttagagataggagaatgtattttttagggttttttagtttttatggtataggtgatgatggtaatatttttaaaaagttaggtataagttagggagatataagttgatgttacggttagtttgagattgggtggcgtattttttatatataatcgttattttttatttatttttattttagagggttttagagttagcggaaattgtggttaatttggagtagaagtttttaggagttggagaggtaggttttagattttagatggtttttttgggagttggtttttttttgttcggaatttagaattttatttgttttaatagagacgagagttgtttttttagggatttgagataggttagtttaggttggggtaagagaatttgatttgattaggtttggggttatgacggggggtgagggaaggggtttgtgggagtttttttgggattggttggagaggaatgaggaatttgtatatttatttgtttgtttatgagggtttgtttttggggaggttgttaggggttaggtagggaggttttttgttttttttttttttttttgagatggagtttcgttttgttgttaggttagagtgtagtggcgcgattttagtttatcgtaagttttatttttcgggtttatgttatttttttgttttagttttttgagtagttaggattataggcgtttattattacgttcggttaattttttgtatttttagtagagatagtattttattaggttagttaggatggtttcgattttttgatttcgtgattcgtttattttagttttttaaagtgttgggattataggtttgagttattgtggtcggttttgatttttatttttaagttaggattatttttattagcgttgttatatataattttttttattgatgcggtaattgagtatttgaaatatagttggtatggttaggtatagtggtttacgtttgtaattttagtattgtgggaggttaaggtgggtagattatttgaggttagtagttcgagattagttcggttaatatggtgaaattttatttttattgaaaatattaaaattagttaggtttggtgacgtttttgtagttttagttattcgggaagttgaggtataagaatcgtttgaattcggtaggtggaggttgtagtgagtttagattgcgtttattgtattttatttagtttgggcgatatagtaagattttgttttaaggggaaaaaaatgaaatatagttggtgggattgagtattgtatttttattgtattttattttaattaatatatatttaagttgaagtagttaaatgtggttagtagtattgtatttagagtagtattgagttgaagatttaggtaggaggtcgaaggtagggataggaaggttagggtttaaggtttgtgtagttatggtagagaagcgattttggtaaagcgtagagtgaggttttaggaagggaggaggtgggatattcggtttcggtatttggttttattggaagagaggtatatttagtttttagggttaaagtgtttgttatatatatatgtatttatgtttgtgtgtgagtataggggttggtgtgtttcgaggtatttataggtgcgtttgtgtgggatttaggagttttatgtttatgagcgatttaagagtttatttatgtatggatattgtatggatttttaggtatatatagataatgggtgtgtgtttttttttgagtatttatgttttttgggtaggttagtaaggattattagtttagtaggttttgtaagaaggtttatatgtattggtgtattttttgggggttgttttgtgggatttaatgttttatgtttggtaggatgtgggtttttaagcggttcggtataaagcggttgtcgatggtttttattagttttagttttaagtaagtgtttttttttttttatagtagtaatgtgggtgtggttagtttttggggttttagggggaagtttttgtggttaggatagatagataggtagatagataggtagaaggatggttgttttttatttttttgtttttgtaaattttttgagtttatgtttggtaattggttttatttgaagaggtttcggtagtagttgaggggtttagtgaggttattaggttgtgagaagttataaaggaaggtttcgagttcgttgggggttaagtatgggatgtttgttttgcggtgggtgagggtggtttttagaatttaggtatatagtaggattttggttttagtgtttagtttgtttagtttcgatttgttttttttttttttttaatttgtattttttgtatttgaaagttagatatagatagtagtttttcgggtagttagggtagttggaataggaatatgtagtgggaacggaagaattggttgatgtggtgtagggaatagtttggggtgggagggttgggggagagatataaggtttgtttttggggtggttttatatatttgtatttttatatatatttaggttagggatataagttttaggaatgttattgttgtttgtttgggtttgtgaaggtattagatattttttttggtttgggtattagttatatttttttttgttatgttttattatttataggatgggggtattttttgggaatttttatatttaaaggtgtgttttttttgtttaggttagggtgcgttttttttgttttatttagttaatatttattgagtaattattgtatgttaggttttgttttagatatagtagtgaatgagatagttaaaattttttgtttattttaggtaatttaaggaaatttttgtatttataatttttttttttttttttttttttttttttttttgagatagagtttcgttttgtcgtttaggttggagtgtagtggtgtgattttggtttattgcgagtttcgtttttcgggtttacgttatttttttgttttagtttttcggtagttgggattataggtattcgttattacgttcggttaattttttttgtatttttagtagagatagggttttatagtgttagttaggatggtttcgattttcggattttatgatttattcgttttagttttttaaagttttgggattatagacgtgaattatcgtattcggtttttaaaaaataattttttaaaaattagtagggtgtggtggtgtgtgtttatagttttagttatttgagaagtagaagtgggaggatcgtttgagtttaggagtttgaggttgtagtgagttgtaattatagtattgtattttagtttggattatagaataagattgttttaaaggaaaaaaaataaaatataaaaaaagatatttttaaaagataaaaaattttttgtttttagggagttgatagtttagatggggagatagataagtaaataataataggttgggtgcggtggtttacgtttgtaattttagtattttgggaagttaaggcgggtggattatttgagattaggagttagatattaatttgggtaatatagtgaaaattcgtttttattaaaaatataaaaattagttgggcgtgttggggtatatttgtagttttcgttattttggaggttgaggaaggagagttatttgaatttaggaggtagaggttgttaggtagggtggtttatttttgtaattttagtattttgggaggttgaggtcggtagatcgtttgagtttaggagtttaagattagtttggttaatatgttgaaattttatttttattaaaaatataaaataattagtcggttatggtggtatatatttgtagttttagttattgaggaggttgaggtaagagaattatttgaatttgagaggcggaggttgtcgtgagtcgatattgcgttattgtattgtatagagtgagattttattttaagaaaaaaaaaaaaaaaaggggttaggcgtggtggtttacgtttatatttttagtattttgagaggttaaggtgggtagattataaggttaggagattaagattattttggttaatatggtgaaatttcgtttttattaaaatataaaaaattagttcggtatggtggtttgtaattttagttatttgggaggttgaggtaggggaatcgtttgaatttgggaggcggaggttgtagtgaattgagattacgttattgtattttagtttggcgatagagtaagattttgttttaaaaaaaaaaaaaaaaaaaaaaaaaagaaaagaaaagaaaaagaaaaaaaataataaaagagagagagagagtatagttatgattatagtgttgtatattaatattaggtgatatgatagatattgttaatttttttagttttagttttttttagttggaatatggggataatataatttttataagtttaggagttttaagtaggttattgtgtgtatattttttgttattgtaagtgttataaaaaaatgtggattatttttaagtgtattgtgatttattttattttattttatttttgagatagagttttattttgttatttaggttggagtgtagtggtgcgattttggtttattgtaatttttattttttaggtttaagtgatttttttgttttagtttttcgagtagttgagattataagcgtgtattattatgtttggttgatttttttgtatttttagtagagacggggttttattatgttggttaggttggttttgaatttttgggtttaagtaatttatcggttttggttttttaaagtgtagggattataggtaggagttattacgtttggttatattttattttatttatttattttttgagatggagttttgtttttgttgtttaggttggagtgtaatggtatgattttagtttattgtaatttttattttttaggtttaagagatttttttgtattagtttttcgagtagttgggattataggtatgtattattaatgtttggttaattatattttttttttttttttgtagagatagttggggttttgttatgttgattagattggttttgaatttttggttttaagtgatttttttattttagtttttcggagggttgggattataggtgtgagttattgggtttggcgtgttattaattttcgaatgaggagttttataatcgaagggatttgggttgattgttgtatttttagtttttgatgtgttgataggtatatagagaattgaaaatatagatatatgtttttgtttttttgtatataagtatattttagtgtttcggatttttatatatattttggtatatcgatatgggggtattattgattataattattcgttcgattagggatgggtagtagatggagaaatgttaggtaaggagggtattttagttatgggttataaggatgtatttcgagtaatttgtgggaatttaaggagttcgtataagtgaggtgtttagtaggattgaagtagggatgggggaagtaggttttagtaaggagaaagcgggggtatgcgtgtgtgtaggatgagggaggttacgtttaggatgggggtatgtttgtatttaggtttaggatgatatttttgatgtttattagtagtaggtcgattgtgtagtagtttatatttcgaggtgtattcgaggggttatagtttcgtaagtttatagttataatatggaagcggttttggaattttcggagttggtaacgttaggagaatttgttaggcgggcgagggagggaggttgagttagggtttttaggttgtatttgtattttacgtatattagtaattattggtaaatttttttttttgttttaaattttttttaaaaggaggatggggaattttaggtagaggtagaggttgaggttgaagttagttatattttgaatttagggaattttaattaattttaatatttttttgttttgtttttttagggtttagggattttgggtatgttggtttagtatttttatttttatttatgtttagtttgtttcgatttatatagtttttttttttgttttttgggagtttaagttttatttgttttcgagtttcgtgggttttaggtttttggttttagacgtattagtttttagggaagtcgtgtagaaatagtatgaggggttcgttatttcgtttagtcgagatatagtgtagacgtaggttcgagttttagggggagggtatagtttgaagtttggggaattttttttttcgaggtttgaatcgtttcgattttacgcgatttcgtagtttcgatagcgttttcgtgcgattattttgaggtttaggaaatcgtgtttatttagcgaggggtcgtttaggtaggcgggggacgcgtttcgacggcgttcgtagtagtcgcgtcggggtcggtatagtacgtgcgtgagcgttatgtagtcgtagatcgtcgcggttattagcgttatcgagaatattaggttttatatgaaggcgcgtagtagttttagcgataggcgcgacggcgttagtagcgcggttattattagtttcggtatgtcgtcgcgtttcgggattacggcggcgttgtcggttaggggtatttgtagtagcggcgaagcggtgttagggtttaggggtttatcgtttttggtttggggttttttcgtgtcgtcgggatttgtgggacgcgttgaaggaagaggcgggcggtttcgatagaaaatagttagagcgtattatttatttgagtgttaggtaaatatttgggcgcgatagggataggaaataagggtagggtgcggaggttggggaggaagaggttggaaaggggggaaataaatgggcggggtttagtaggttttgtgcggggtttagggtcggggcggggtttaggaagatttagtagcgggtgggtgagggtttaaaggcggtaatttcgggtcgggtgcggtggtttacgtttgtaattttagtattttggtaggtcgaggcgggcggattatttgagattaagagttcgagattagtttgggtaacgtggtgaaatttcgtttttattaaaaatataaaaattagttgggcgtggtggcgggcgtttgtagttttagttatttgggaggttgaggtaggagaatcgtttgaattcgggacgtggaggttgtagtgagttgagatcgcgttattgtattttagtttgggttataatagggaaatttcgttttaaaaaagaaaaaaaaaaaaggtaatttcgagtttagataaattttaaggaggggattttggatttttagttaagtgggcgatatttggagtgaggggcggggtatatgtagagtaggtgcggtttataagttaaaaaggagaaagagttggaatggtgggtttggtttatgcgggtgggcggggagagggtggattttagaggaggtgaggtttaatattgggcgaagaaggcgggagtttgggttaatgagttgacggtaggtcggggagggggcggtggggtggggtgggtaatgggtaatgagacggagggcggggtcgggatttaatatggcgggttaggagggtttggaagacgaagaagagggataggtaatgttaggtttaggattaggagggaggcgcgggcggtattagcggttggaggaggtttcgggaggttcggtcgacggtcgtcgtttggtgttatttatttaggggcgcgcgatttttttttcggtttggttttaaagatttagtagtattgattttatttagttgtggttttaacggcgggtttagcggtttcggttcggcgtcgtttttttgttggtttaataggttcgttagttcgtttttgtacgtttgtgattggacggcggcggttattgatgtttaagcgataggttttggttcgggagttaatttgtaggtgttgaggtttaggtttcgagagcgggtcgaggaggcgtggatattttgatttttagggggtaggtttggttttttcgaggaggattcggtttatgaatgattggagttttggggttttggtcgaaagaggaagtgggatagggtcgggtgtgatggggtttagagttatagagttttgcggttttgttgtttttgtaagaagttagtttttggttaggcgcggtggtttacgtttgtaattttagtattttgggaggtcgaggcgggcggattacgaggttaggagatcgagattattttaatatggtgaaattttgtttttattaaaaatataaaaaattagttaggcgtggtggcgggcgtttgtagttttagttattagggaggttgaggtaggagaacggcgtgaatttaggaggcggaggttgtagtgagttgagattgcgttattgtattttagttagggcgatagagcgagatttcgttttaaaaaaaaaaaaaaaagtagttagttttttttttttattttgtaattttttttcgatatttttgaatattttagggatagttattatttaattatagagtaattttattaagtttaagtagtataattatatttttgtagtatagattatgaatttgaaattcgaggatgaagttatttgtttgaagatatatattttgtaaaatagttattcgtaaagatgtagggaaaaaggtagcgatttgtggttatattttttttttttttcggaagtagttattggaacgtttttagtttttttttttttttttagatggagtttcgattatagtttattgtagtttcgaatttttgggtttaagtattataatttgtagttgggattataggtttgtgttattatatttagttaattttttaaaaattttttagagagacgatttgttatattgtttaggttggttttaaatttttggttttaagtaatttttaagtttttattttttaaagtgggattatagatgtaagttatcgtgtttgatttttattttttgatttaattaatgtatgatattagttattgatttgtttatattattatttcggacgtgtcgttttttgtttttttgttagttttttttaaaaatattttatttgttattttttgtttttttttattttttatttttatttatatatttttgtattgttaaggttgttaaatattatattgttttgggattataattaagtttatgaagttgttatttaaaggtgaatagtggtttatgttttgttttagtgaataatgtattttaagagtcgaatagattattatgattatattgtttatagtgtataaatttttgttttttttggattatttaattattattttttttttgttgtgtgattagtttatattaaagttttgggggtttttttgtttttgttttttttgagatgggagttttattatattatttaagttggaatgtagtggtgtgatttcggtttatcgtaattttcgttt

SEQ ID NO: 138 - DNA, 13670 bp, Artificial Sequence
  chemically treated genomic DNA (Homo sapiens)
aggcggaggttgcggtgagtcgagattatattattgtattttagtttgggtgatatggtgagatttttattttaaaaaaaataaaaataaaaaaatttttaaagttttgatgtaggttaattatataataaaagaaaggtagtggttaagtagtttagggagaataaaagtttgtatattatgggtaatgtaattatagtggtttattcggtttttgagatgtattgtttattgaggtagaatataaattattatttatttttaagtggtaattttatggatttagttatggttttaggatagtataatgtttagtagttttgatagtataaaggtatatggataaaagtgggaggtggaaaggggtaagaggtgataagtggagtgtttttaaaggaaattaatagggaaataaaaaacggtacgttcggggtagtgatgtgagtaagttagtggttgatgttatatattggttaagttaagaaataaaggttaggtacggtggtttgtatttgtaattttattttgggaggtggaggtttgaggattgtttgaggttaggagtttgagattagtttggataatatagtaagtcgtttttttgaaaagtttttgaaaaattagttgagtgtggtggtataggtttgtagttttaattataggttgtagtgtttgagtttaggagttcgaggttgtagtgagttatgatcgaaattttatttgaaaaaaaaagaaaaagttaaaaacgttttagtggttgttttcgggaggaaggggaggtgtagttatagatcgttgtttttttttttatatttttgcggatggttattttataagatgtatgtttttaggtaaatgattttattttcgaattttaggtttatgatttatattataggaatgtgattatgttatttagatttaatagggttgttttatggttaagtgatggttgtttttaaaatgtttaaggatatcgggagaaggttgtaaaataggaggaagaagttggttgtttttttttttttttttgagacggagtttcgttttgtcgttttggttggagtgtagtggcgtaattttagtttattgtaattttcgttttttgggtttacgtcgtttttttgttttagtttttttagtagttgggattataggcgttcgttattacgtttggttaattttttgtatttttagtagagatagggttttattatgttaggatggtttcgattttttgatttcgtgattcgttcgtttcggttttttaaagtgttgggattataggcgtgagttatcgcgtttggttagaagttggttttttgtagggatagtagggtcgtaaggttttgtgattttaggttttattatattcggttttgttttattttttttttcggttagaattttagaattttagttatttataggtcgggtttttttcgggggaattaggtttgttttttaggaattagggtatttacgttttttcggttcgttttcggagtttgggttttaatatttgtagattggttttcgggttaggatttgtcgtttgaatattagtggtcgtcgtcgtttaattatagacgtataggggcgggttggcgggtttgttgggttagtaggaggacggcgtcgggtcgaggtcgttggattcgtcgttggaattatagttgggtgaagttagtgttgttaggtttttggagttagatcgaagggagggtcgcgcgtttttgggtgggtagtattaggcggcggtcgtcggtcgggtttttcgaagttttttttagtcgttaatatcgttcgcgttttttttttagttttagatttggtattgtttgtttttttttttcgttttttagatttttttgattcgttatattaggtttcggtttcgtttttcgttttattgtttattgtttattttattttatcgtttttttttcggtttatcgttagtttattggtttaggttttcgtttttttcgtttaatgttaggttttattttttttaggatttatttttttttcgtttattcgtataagttaggtttattattttaatttttttttttttttggtttgtaggtcgtatttattttgtatatgtttcgttttttattttaggtgtcgtttatttaattgaagatttaggattttttttttaaggtttgtttgggttcggaattgtttttttttttttttttttttgagacggagtttttttgttgtgatttaggttggagtatagtggcgcgattttagtttattgtaatttttacgtttcgggtttaagcgatttttttgttttagttttttaagtagttgggattataggcgttcgttattacgtttagttaatttttgtatttttagtagagacggggttttattacgttgtttaggttggtttcgagtttttgattttaggtgattcgttcgtttcggtttattaaagtgttgggattataggcgtgagttatcgtattcggttcggaattgtcgtttttagatttttatttattcgttgttgagtttttttgggtttcgtttcggttttaagtttcgtataggatttgttaggtttcgtttatttattttttttttttttaatttttttttttttagttttcgtattttatttttgttttttgtttttgtcgcgtttaggtgtttatttggtatttaggtgagtggtgcgttttggttgttttttgtcggagtcgttcgtttttttttttagcgcgttttataaatttcgacggtacggaggggttttaggttaagggcgatgggtttttgagttttgatatcgtttcgtcgttgttgtaggtgtttttggtcggtagcgtcgtcgtggtttcggagcgcggcgatatgtcggagttggtggtgatcgcgttgttggcgtcgtcgcgtttgtcgttgaagttgttgcgcgtttttatgtggagtttggtgttttcggtggcgttggtggtcgcggcggtttacggttgtatagcgtttacgtacgtgttgtgtcggtttcggcgcggttgttgcgggcgtcgtcggagcgcgtttttcgtttgtttgagcgatttttcgttgggtgagtacggttttttgaattttaaggtgatcgtacgggggcgttatcggggttgcggggtcgcgtggggtcgagacggtttaagtttcgggagagagggttttttaggttttaggttgtgttttttttttagagttcgggtttgcgtttgtattatgtttcggttggacgaggtaacggattttttatgttgtttttgtacggtttttttgagaattggtacgtttggggttaggggtttgaggtttacgggattcgggggtaggtggagtttgggtttttaagaggtagggaggagggttgtatagatcgggataagttgaatatagatggggataggggtattgagttagtatatttaggatttttaggttttgaagggataggataaaggggtattgaggttgattgaagttttttggatttagggtgtagttggttttagttttagtttttgtttttgtttgggattttttattttttttttaggggaagtttagagtaggaaggagggtttgttaatggttgttgatgtgcgtagggtgtaggtgtaatttgagggttttgatttagtttttttttttcgttcgtttggtaggtttttttggcgttattagtttcgggagttttagagtcgtttttatgttgtggttgtggatttgcgaggttatggtttttcggatgtatttcgggatgtggattgttatataatcgatttgttgttggtggatattaaagatgttattttaggtttgggtgtagatatatttttattttaggcgtggttttttttattttgtatatacgtatattttcgttttttttttgttggaatttattttttttatttttgttttagttttattgggtattttatttatgcgagttttttgaatttttataggttattcgaagtgtatttttgtggtttatgattggggtgttttttttgtttggtatttttttatttattatttatttttggtcgagcggatggttgtggttagtggtgtttttatgtcggtgtattaaggtgtgtgtgggagttcgggatattgggatgtatttatgtgtaagggggtagggatatgtgtttgtgtttttaattttttgtatatttgttaatatattaggggttgagggtgtagtaattaatttaggttttttcggttgtggaattttttattcggaaattaatgatacgttagatttagtggtttatatttgtaattttagtttttcgggaggttgaggtgggaggattatttgaggttaggagtttaagattagtttggttaatatagtaagattttaattgtttttataaaaaaaaaaaaaaaatgtaattagttaggtattggtggtgtatgtttgtaattttagttattcgggaggttgatgtaggagaattttttgaatttgggaggtggaggttgtagtgagttgagattatgttattgtattttagtttaggtaataagagtaaaattttattttaaaaaataaataaataaaataaagtatggttaggcgtggtggtttttgtttgtaatttttgtattttgggaggttaaagtcggtggattgtttgagtttaggggtttaagattagtttggttaatatggtgaaatttcgtttttattaaaaatataaaaaaattagttaggtatggtagtgtacgtttgtagttttagttattcgggaggttgaggtaagagaattatttgaatttgagaagtggaggttgtagtaagttaagatcgtattattgtattttagtttggatgatagagtgagattttgttttaaaaataaaataaaataaaataaattataatatatttaggagtaatttatatttttttatagtatttatagtaataaggaatatgtatatagtaatttatttaaggtttttgggtttatgaaggttgtattatttttatgttttagttggaggaaattgaggttggggaggttaataatgtttattatattatttgatgttaatatgtagtattgtggttataattgtgtttttttttttttttttgttgtttttttttttttttttttttttttttttttttttttttttttttttttttgagatagagttttgttttgtcgttaggttggagtgtagtggcgtgattttagtttattgtaattttcgttttttaggtttaagcgatttttttgttttagttttttaagtagttgggattataggttattatgtcgggttaattttttgtattttagtagagacggggttttattatgttggttaagatggttttgattttttgattttgtgatttgtttattttggttttttaaagtgttgggagtataggcgtgagttattacgtttggtttttttttttttttttttttttgagatggagttttattttgtgtagtgtagtggcgtaatgtcggtttacggtaattttcgttttttaggtttaagtgatttttttgttttagtttttttagtagttgagattatagatgtgtgttattatgatcggttaattattttgtatttttagtagaaatggggttttagtatgttggttaggttggttttgaatttttgggtttaagcgatttgtcggttttagttttttaaagtgttgggattataggagtgagttattttgtttggtaatttttattttttgggtttaagtgattttttttttttagtttttagagtagcggggattgtagatatgttttaatacgtttagttaatttttgtatttttagtggagacgggtttttattatgttgtttaggttagtgtttaatttttgattttaagtgatttattcgttttggttttttaaagtgttgggattataggcgtgagttatcgtatttagtttattattgtttatttgtttgtttttttatttagattgttagttttttgagggtagggagttttttgttttttgggggtgtttttttttgtgttttgtttttttttttttgagatagttttgttttgtggtttaggttggagtgtagtgttgtaattgtagtttattgtagttttagatttttgggtttaagcgatttttttatttttgttttttaagtagttgggattataggtatatattattatattttgttaatttttaaaaaattattttttggaggtcgggtgcggtggtttacgtttgtaattttagaattttgggaggttgaggcgggtggattatgaggttcggagatcgagattattttggttaatattgtgaaattttgtttttattaaaaatataaaaaaaattagtcggacgtggtggcgggtgtttgtagttttagttatcgggaggttgaggtaggagaatggcgtgaattcgggaggcggagttcgtagtgagttaagattatattattgtattttagtttgggcgatagagcgagattttgttttaaaaaaaaaaaaaaaaaaaaaaaaaaaaaaaaattatagatataggggtttttttaagttgtttaggatgaatagggagttttgattgttttatttattgttgtgtttagaataaggtttggtatgtagtagttgtttaataaatgttagttgaataaagtagaggaaacgtattttggtttgggtagaggaagtatatttttggatatgggggtttttaggagatgtttttattttgtggatagtgaaatatggtaggagggaatgtagttggtgtttaggttaggaggggtatttagtatttttatagatttaggtaggtagtagtggtatttttgaggtttgtgtttttgatttgggtatgtgtaggggtgtaggtgtatggggttattttaggagtaggttttatattttttttttaatttttttattttagattattttttgtattatattagttagttttttcgtttttattatatgtttttgttttagttgttttggttgttcgagaagttgttgtttatgtttgatttttaggtatagagggtgtaggttgaagggaggagggaagtaggtcggggttgggtaggttgggtattgaagttagagttttgttgtgtatttagattttgaagattatttttatttatcgtaagataggtattttatgtttgatttttagcgagttcgaggtttttttttataattttttatagtttggtggttttattgggttttttaattattatcgaaatttttttaggtgagattagttgttaagtataagtttaggagatttgtaggggtaggggggtgggaggtaattatttttttgtttgtttgtttgtttgtttgtttgttttggttataggaatttttttttggaattttaggagttgattatatttatattgttgttgtggggggagaaggatatttatttggagttggggttggtggaagttatcggtagtcgttttgtgtcgggtcgtttggaggtttatattttgttaggtatagggtattggattttatagagtaatttttaggagatgtattagtatatgtgggtttttttgtaagatttgttggattagtggtttttgttggtttgtttaggaggtatggatatttaggaaggaatatatatttattatttgtgtgtgtttgggagtttatataatgtttatatatgggtgaatttttgaatcgtttataggtatgggatttttggattttatataagcgtatttatgggtgtttcgggatatattaatttttatatttatatataggtatggatgtatgtgtgtgtaataaatattttgattttgggaattgggtatattttttttttagtggagttagatgtcgagatcgagtgttttattttttttttttttggggttttattttgcgttttgttaaagtcgtttttttgttatagttgtatagattttaaattttgatttttttgtttttgttttcgattttttgtttgggtttttagtttagtgttattttgaatataatattgttgattatatttggttattttagtttaaatgtatgttaattgaaatgaaatataatgaaaatgtagtgtttagttttattagttgtattttatttttttttttttgagatagagttttgttgtgtcgtttaggttggatggagtgtagtggacgtaatttaggtttattgtaatttttatttgtcgggtttaagcgatttttgtgttttagtttttcgagtagttgggattataggagcgttattaggtttgattaattttagtatttttagtagagatggggttttattatgttggtcgggttggtttcgaattgttgattttaagtgatttgtttattttggttttttatagtgttgggattataggcgtgagttattgtgtttggttatattagttgtattttaagtgtttaattgtcgtattagtgaagaaagttgtgtgtggtagcgttgatgagggtaattttagtttaagagtaggggttagggtcgattatagtggtttaaatttgtaattttagtattttgggaggttgaggtgggcggattacgaggttaggagatcgagattattttggttaatttggtgaaatgttgtttttattaaaaatataaaaaattagtcgggcgtggtggtgggcgtttgtagttttagttatttaggaggttgaggtaggagaatggtatgaattcgggaagtggagtttgcggtgagttgagatcgcgttattgtattttagtttggtaatagagcgagattttattttaaaaaaaaaaaaaaagagtagggggtttttttgtttggtttttggtaatttttttaagggtagatttttatgagtaggtaggtgggtgtgtagattttttatttttttttagttagttttaggagagtttttataagtttttttttttatttttcgttatgattttaggtttggttaggttaagtttttttgttttagtttgggttggtttgttttagatttttgggaaaatagttttcgtttttgttaggataagtgagattttggatttcgggtaggaagggattagtttttagaaaagttatttgggatttgaggtttgtttttttagtttttggaaatttttgttttaaattagttatagttttcgttgattttggagttttttggggtggggatgggtggggggtggcggttatatgtggagggtgcgttatttagttttaggttgatcgtagtattagtttgtatttttttggtttgtgtttggttttttggggatgttgttattattatttgtattatgaggattgagaggttttgagaaatatatttttttgtttttgagataggtttgtttgttggttatttttttttgtttttttttatttttagtataatattttttttttgtttgtttgtttgtgagatggagttttgttttgtcgtttaggttggagtgtaattgcgcgatttcggtttattgtagtttttttttaggtttaagcgatttttttgtttttgttttttgaatagttgggattataggtgttcgttattatatttagtttatttttgtattttttttttttttttttttttttgagacggagtttcgttttgttttaggatggagtgtagtggtgcgatttcggtttattgtaagtttcgtttttcgggtttatattatttttttgttttagtttttcgagtagttgggattataggcgtttattattacgttcggttaattttttgtatttttagtagagatagggttttatcgtgttagttaggatggtttcgattttttgattttatgatttattcgtttcggttttttaaagtgttgggattataggcgtgagttatcgtatttggtttatttttgtatttttagtagagatggggttttattatgttggttaggttggtttcgaatttttgattttattattcgtttatttcggttttttaaagtgttgggattataggcgtgagttattgcgtttggtataatatttttttatttaatatagatattaggtagtgttttaggttttagtgatagagtgtgagttagaaagagtttaaggaggagagagttgatagggtttagggaaggttttattgaagatttataggtgggattttagttagaggatgtatttatttgttgttgttttgagatagggttttattttgttgtttaggttggagtgtagtggtgtgacgtaagtttatagtagtttttattttttgggtttaattaatttttttgttttagttttttgagtagttgggattataggggtatattattatgttaggttaatttttaattttttttttgagaatggaggtttgttttattgtttaggcgggagtgtagtggcgttattttagtttattgtaatttttattttttgggtttaagtgatttttttgttttagtttttttagtagttaggattatagatatacgttattatatttggttaatttttgtaattttagtagagacggggttttattatgttggttaggttgatttttaacgtttgattttaagtagttcgtttgtttcggttttttaaaaattttttatagagatagacgttttattatgttgtttagagtggttttaaatttttcggtttaagtgatttttttatttcggttttttaaagtgttgggattttaggtatgagttatcgcgttcgtttaggatgtattttttggtggagtgggaagtagtgattaggaaggttttaggcgggaagaagtttgggttattggagttataatacgtaggttagggttttgttaaggtagagtgagcgaggaggttttagagaagaggttatatagttagatcgttaggggttgcgaggagtttggattcgatttttaaggggagttaggggagggtttttagtagggaagggatatggtttgtattttgaagagttttttgtggcggttggatagttttacgtaagagtgcgagcgtcgaagtttgcggggggttgcgcgcggttatagtatagggcggttttattgtttcgatcgagtagggatttttagagtcgggtttaattcggggtttttttgttaggggaggagtaatgtttttcgtttcggggaggcgagaagacgggtaggaggaggagggagtttttgagacgtggggtcgcggacgtcggagttcgcggcggaggtttggggcgaggaggtttgcggataggattaggacggcgtttaggggtaggtgggttcggcgatggttgtcggggtgacgggggacgggttgatggttgatcggaacgggtagcggttgttcgagtgatcggaggggtttaggtaaaggttgacgggaggtttgggatagttgttcgggcgacggagattcgttgacggttgttagggcgacggaaaggcgttttttttcgttttcgcggtcgtcggcgggagggaggcgggggttttttggggaagacgatcgcgtcgattgggtagagttttggcgagtaagttaatagaaaatcgtgtttcgtcgtagattcgttttttttagtttgagttaatttcggttcgttttttttttttttttttggtttaagggtttggcgcgtgtattttttagggcgggagcggggatttcgggggtttgggttgggatttttcgtatgatcggtttgtttttttttttgtttttagattattttttattatttatttatttatttatttatttatttatttatttcgagggttgtattgatggtttagtagtagaatttttattttttatttatttatttatttatttatttgtttttgttattagttttaggaggggtggtggaagataaagtcgggttttgatattgttagtagggtgtgattaggttttggtggaatgagtaattggggaggagtatttatttgggggaagggagggaaggttttttggaggaagtagttttggagttgaattttgtaaagttgcgtttcgatttatagaagttttttacgtcgggatgatttagtattttcgtgagattgggaggaaagtttgggttaggaagacgtgagattataaaaggttttatatgttagtaggggagggtttcggatagattcgtgtgtttggaatgttatttgggggatggtgagaaggtcggattagaggacgggaaggttttagaggaggatgggcgtggtttaggtagtggagaacgagatttaagtttaggtattggaagaggagtagatacgttgagaaggtatagaggtaggtttgggatatatttagtttgacggcgttggatttcggggtagggatttagaagtatgttatgggttaaagataaaaatagtttagtaagtatcggtgtattgtggggtagagaggtttttaagttgggagcgagggtgaagtttttttagagtagaatggagaataagattggagattgaattttgaggatttttaatattttagagataggtagaggagagaggttataaaggtaggaggtgaggttaggtacggtggtttacgtttgtaattttagtattttgggaggtcgaggcgggtagattataaggttaggagatcgagatcgttttggttaatatggtgaaattttatttttattaaaattataaaaaattagtcgggtatggtggtatatgtttgtagttttagttattcgggaggttgaggtaggagaattatttgaattcgggaggtagaggttgtagtgagttaagattatgttattgtattttagtttgggcgagagagggagattttattttaaaaaaaaagtttaggtatagtggtttatatttgtaattttagtattttgggaggtcgaggcgggaggaatacgaagttaggagtttgagataagtttgtttagtatagcgaaatttcgtttttattaaaaatataaatattagttaggcgtggtggtgggcgtttgtaattttagttattcgggaggttgaggtaggagaatcgtttgaattcgggaggtggaggttatagtgagttaagattatattattgtattatagtttggatgatagagttagattttattttaaaaaaaaaaaaaaaaaaaaaggtaggaggtgaattaggtaaaagtgatgttttagtaatggaggagggaggagcgttaaggaatagggatgtagtttttggcgttataagttgttgagagataagcgtggtggtttatgtttttaattttagtattttgggaggtcgaggaaggaggattacggtagattaagagttttgagattagttttggaaatattgtaagattttttgttttttaaaaaaaaaaaaaaaaatttaattgttgggtatggaggcgtgtgtttgtagttttagttttttaggaggttgagatgggaggatcgtttgagtttgtgaggttaagattataatgagttgtgattatgttattgtattttagtttggagatagagtaagatcgtgttttaaaaataaataaataaaaatttaggtcgggcgtagtggtttattcgtgtaattttagtatt

SEQ ID NO: 139 - DNA, 3479 bp, Artificial Sequence
  chemically treated genomic DNA (Homo sapiens)
gttggagcgaagtttgcgggacgtcgtagagaaaattatttaaaagtacggtattaatttcgaggagatcgcggtcgaggagagttgggattatgtgtagttttaggtaagttttttttttttagttttttttcggattgattcgttttagttttgtgtttggaggagattttattttaacgtgggttcgatttttagttttacgattttaatatattttaattttttttaggttcgacgttttttattttttagatgatataattgttttcggcgtcgtttggttttttagtatttagattttggcgtggtttcgttatttatttcgagagatttcgttttcgttttcgtttcgattagaggttgttaggtttttagttttaagattttagcgagatacggttttttatttcgtagtgattttggtttttatcggatttcgttttcgatgagatttatatggtttcgtatttttatttatttgtcgggtattagaggtttaattgtattatttatttaatttttagtttatagcgcgattttgtagttttttttttagttttaggttatttcgtgattcgttttttttagttttatgttttcgtaatgttttttggtttcggttttatcgtgattttagtttattgttttttattttatatttattatttagttttttgtttttcgatttgattttatatttattattttgttttttgatttttaatattatatgtttttagtttcggtttttttgattcgtattttttttttagttgcgttgttgcggttggtattattcgtaggattggttttaagtttttattttgagaggtaacgggtcggaggcgtatcgcgtgttttgtttttgttataatttgtcggcgattaacgattttataattttagataaggtgattttgttttagtttagtaggtttggatatttggcgcggtttagatatagtgtagatatttgcgttgtttttgtagagagttatatttatcgcgaggtgggtaggggttcggagtataaatttgtcgaatggggcggggtttgcgggagggggagggttgttagtgagtagcggtttgagaaagggcggggtttacgagaaaaggaaaggtacggtaggaggggcggggttttttgaagggggcggggtttgtaggaagggtagggtttaaagaaaaggttgggttggttttggaatatagatgtttagggaggggttaggtttggaaaaggtgaagcgagggtgtattagtaaggagattagagtgttttggtgattaggggagcgggtagatgtttgaagacggtgagggttggtttgaaaagaacgttgggtttgggtttgagagttttagaaagaatttttttaatttttttttatattttttagggttgcgcgtagggtttttagaagtggttgtataataattttatttttatagtgggtatttgtttgggcgtcggtttattcgaggtgatttggtttcgtttttattcgcgatcggttttaaatttttagatggttttgttttttatttcgcgtttttcggttgtttgggaaggacgagtttagggcggagcgtagtttatttcggttttttcgtcgttttatttagtatcggagggtgggggcggtttagttttagggagttttgattgggtgtacgtagggaaagttttttgttattggttgcgatttttttttttttttttcgtagatgattgttatggtgttgagcgtatagttatagcgtagggtatttcgtcggaaatgcgagtcgtacgtgtcgggcgttggggattcgagtttcgggtttagtttgatcgttgacggcggcggcgggtatagcggtagtttgtggggtggttggggtatggcgggtgtttgttttaattggggagataaggtatcgtagggtaagttgtttatggttttggggttttggtcgttgtgggtttaagacgaggattagtttgatattggaagtgcgggcgtagaattagaggaggtataattagaggttgaggtagagggggaagatagatgagtttttaaaataaaggattttgggtttgttttcgattttatttttttttagtttttatttttatttgtagtagttattttcgttttattagttagttttgcggtagttttcgtcgagtttcgtttttttttatttatttttttttttagttttttttcgtttaatttacggttttatttttgatttttttcgttcgggtgggtattattttcgtttcgttagtattttttcgatttttttgattttattttttttttttatagttcgggtttatgacgttttcgatatttttgtgtagaaatttggattacgtttataatcggttcgttcgatatcgttaggtttcgttttttttaaagtttcgtttcgttttcgttacgtgcgttgggtatttttttgttgtttgtaaatatttgtttaatttttagttcgtttggagtttttcgtttttatatttttttggggatttacgtggttgcgtgtttttgttgttgttattttttttacgggatttggggttttcgtttatagttttttgtttttatttgtcggtttattattatttataagattattttttatttaaattttaaataaattttttgcgtttttggtaaaatagttttattttttgttagaatataaataaataaattttgagaggggaggaaggaaatcgtttagtttagggtttatttaggagagggatgagattagaaagtttaatatattgtttgtgtagcggagataaagttaagattttagtatttatttataaatatttcgttatattaaaaaaaaaaaaaatgtttagggtttatttggttttgtttttgtatagaaagggtttatttttattttgtgattttataggttatggagtgagggtggtagagaggggtagaaattttagggggaggggtggttgggaaaaagtaaaggggataagttaatgtgtaattagcgttttttaagatatgtagaggagtgggggtggtttgttaggggttgaaaagaaaagttagtgttgtatttggggggttgttttatttttgtttttataatttttgatatttcggagtgatttgtttttttagatatttattgtgaggttttaatatcggggtttattttttttttagttttagtttgtttagttttttaattaagttttgggggtttttttaatgggggggatggttttagttgtttaggtttttgaggttaatttttttatattatagttttttttttaaataagaagtatgaggtgagttggaggattttttttgggaggagggtgttttggggggtgagttagttttggggtttttttttagtttttgattaggcggtaaatgtgatgttgggttttacgttcgttggtggagatttcgaagatataggcggtgtag

SEQ ID NO: 140 - DNA, 3479 bp, Artificial Sequence
  chemically treated genomic DNA (Homo sapiens)
ttgtatcgtttatgttttcgaggtttttattagcgagcgtggggtttagtattatatttatcgtttggttagggattgaagggggattttaaaattggtttattttttagaatattttttttttagggagggttttttagtttattttatgttttttatttggggagagggttgtgatgtaaaggggttgattttagaggtttaagtaattggggttattttttttattagaggggtttttaaaatttggttggagagttgaataggttgggattgaggaaaggataaatttcgatattgggattttatagtgggtgtttgaaaggatagattatttcggagtattagggattgtggggataggagtgagataattttttaggtatagtattggtttttttttttagtttttgataggttatttttatttttttgtatgttttggagagcgttagttatatattggtttgttttttttatttttttttagttatttttttttttgaaatttttgtttttttttattatttttattttatgatttgtgagattataaagtgaagatgaattttttttgtgtaggagtagagttaggtgggttttggatattttttttttttttaatataacgagatatttataagtgggtgttagggttttgattttattttcgttgtataagtagtgtgttgaattttttaattttattttttttttaagtgagttttgagttagacggttttttttttttttttttaaagtttgtttgtttgtgttttgatagaggataaagttattttattaaaaacgtaggggatttatttgaggtttgggtgaaaaataattttgtgggtggtggtaggtcgatagatggggataggaagttgtggacgaaagttttaggtttcgtgggagaggtgatagtagtaggggtacgtagttacgtgggtttttaggggaatgtgaaggcggagggttttaggcgaattggggattaaataaatatttataggtagtagggaagtgtttagcgtacgtgacgggggcggggcgggattttggggagggcggggtttaacggtatcgagcgagtcggttgtagacgtggtttaggtttttgtataggaatatcgagagcgttatgaattcgagttatagagaaaggagatgaggttagagaagtcgaaggggtgttggcgagacgggggtgatgtttattcgggcgagaaaggttaggggtggggtcgtgaattgggcgggaaggggttggagaaggggataggtagaaaagggcggggttcgacgggaattgtcgtagggttggttgatgaggcgggaatagttgttataagtgggggtagaggttgagaaggagtaaggtcggaagtaagtttagggttttttattttggaggtttatttgttttttttttttgttttagtttttaattgtgttttttttaattttgcgttcgtatttttagtgttaggttggttttcgttttgaatttatagcggttagagttttagggttatgggtagtttgttttgcggtgttttgtttttttagttggggtaggtattcgttatgttttagttattttatagattgtcgttgtgttcgtcgtcgtcgttagcgattaggttgggttcggggttcgaatttttagcgttcggtacgtgcggttcgtattttcggcggagtgttttgcgttgtagttgtacgtttagtattatgatagttatttgcggagaaaggggagggagatcgtagttaatagtaggaggttttttttgcgtatatttaattagggttttttgaagttgggtcgtttttatttttcggtgttgggtggagcggcgggagggtcggggtgggttgcgtttcgttttgagttcgttttttttaggtaatcgaaggacgcgaaatgaagggtagggttatttagggatttagggtcgatcgcgggtgggggcggggttagattatttcgagtaggtcgacgtttaggtaaatgtttattatggaaataaggttgttgtgtagttatttttggaggttttgcgcgtagttttggggggtgtagggaaaagttaaagggattttttttgggatttttaagtttaggtttagcgttttttttaggttaatttttatcgtttttaggtatttattcgtttttttagttattagggtattttagtttttttattagtgtattttcgttttattttttttaagtttggtttttttttagatatttgtattttagagttagtttagttttttttttaggttttgttttttttgtagatttcgttttttttagagggtttcgttttttttgtcgtatttttttttttttcgtagatttcgtttttttttaggtcgttatttattgatagttttttttttttcgtaggtttcgttttattcgataggtttatgtttcgaatttttgtttatttcgcggtagatgtggttttttgtagggatagcgtagatgtttgtattgtgtttggatcgcgttaggtgtttaagtttgttgagttggggtaagattattttatttaggattgtggagtcgttggtcgtcgataagttgtagtaggagtagggtacgcggtgcgttttcgattcgttattttttaggatgaggatttggaattagttttgcgggtagtgttagtcgtagtagcgtagttgggagagggatacgagttagagggatcgggattggagatatatgatgttggggattaggggataaggtgatgggtatgaggttaggtcggggagtaggggattaagtggtgggtgtggagtgggggatagtgggttggggttacgatggggtcggagttaggggatattacgggaatatggggttgggaaagacgagttacggggtgatttggggttggggaaggagttgtagggtcgcgttgtggattagagattgggtgggtggtgtaattgagtttttgatattcgataggtgaataggagtgcgagattatgtgagttttatcgggggcggggttcggtggaagttagagttattacggggtaggaagtcgtgtttcgttagggttttgggattaggggtttgataatttttggtcggggcgggggcgggggcggagtttttcgaggtagatggcgaagttacgttagggtttgggtattgggagattaggcgacgtcggggatagttgtgttatttggggagtggggagcgtcgggtttgggagggattggggtgtgttaggatcgtagagttgggggtcgggtttacgttggggtggagttttttttaagtatagggttgaggcgggttagttcgggagggaattggaggaggggggtttatttggaattgtatatagttttagtttttttcggtcgcggttttttcggggttggtgtcgtatttttggatggttttttttacgacgtttcgtaagtttcgttttagt

SEQ ID NO: 141 - DNA, 10857 bp, Artificial Sequence
  chemically treated genomic DNA (Homo sapiens)
ttttagcgttttggggggttgcggtaggagaatcgttttgggagtaggagttgtaggtcgtagtgagttatgattagtttgggcgattgagcgagattttgtttttaaaataaatatataagttcgggcgcggtggtttatgtttgtaattttagtattttgggaggtcgaggtgggcggattacgaggttaagaaatcgagattattttggttaatatggtgaaatttcgtttttattaaaaatataaaaattagttgggcgtggtggtgcgcgtttgtagttttagttattcgggaggttgaggtaggagaatcgtttgaattcgggaggtagaggttgtagtgagtcgagatcgtgttattgtattttagtttggcgatagagtgagatttcgttttagaataaataaataaaaggatagaaaggcgagtataaatatttttaatttataatattttttcgtattgttaatgttttagatacgcgttattatttttagtaaatttttttaggcgtttgtaggatgggttaaggaaggcgacgagtattagttgttttgttgaggttgtttcgacgttatatgattttttaattatatgatttttagaaatggggtgtggggcgagaggaagtagggaggagagtgatttgagtagaaaagaaatatagtattttaggttggttttatttttatattgataagtagttaatgggagcgggtagttttgatttttggttaatggaaattgaggtaggcgggttatcgcgttggggtttgtagtttgagcgttattcggttgttgttgtttaaggatcgcggagtcggacgtaggtaggagagcggtcgcgtagatttttcgtttgtttttgtttaggggttcgttagggttatgtgagtttgaggtttttttggagttttagtcggagataatagaagaatcgtttattgaaattttttgggggttttgatatattagggggagttttatgggaaagaggaagtagtaattgtagtgacgtttcgttagaaggggttttttatttttttagtatttttttaaagtagggattatattatttttgatttagttttatttttgtcggtaggtgttggttttttttttttttttggtggtggtgggtggttttcgcggcggtttggagtcggaggggcgcgcgattttgggttgggagtttcgagggtttgggaacgagatttgagattttggtttttcgaaggtagtagggatttgggagtggtgattgaatttggtttggtttttttttatttttttttgttgcgggtgggacgagttagttttcgttttttttagttatttttttttgtttatttgtagttaggttggttttttttttgggaattttttttttttttggtattcggagttggggggtgttatttagtggaagataacggagttagggttttgaagaggttgttgttttttttggttgttttggcggtgtagggtggtatgagagattgcgattcgtttttttatttttgtttttgtatgcgagtgtttgtatttagtagaagtatatattatatttttttaatttagggtaaataggaggggttatatgtataggtaatttattagggagtcgaatatttttgtgtagatagatttttttttttagtaagttatggtagcggatagtttgttgagaatatttaggaagtaggcggtgttagttgtaggtgttttgtttgggagttgtggggttgaggagagggtttattgtttaggattagtgaattttatttttatttgtttaggaggtggttttttggggatgttgagttaggggaggggtatttgaggaaagttaggtggagtagagaggatgtgagtgattgggtgggtgagattttttgttttttttttcgtagtggtatttatatttagattcgtggggtaattgaggtatagatagagagtaattttttaggtttttatagttggtaattttaggattaggatttaagtgcgatttttaggtagtttttgtattttgtttttgttgtatttgttgtattatttttaggtattgtttatcgtgttattagtgatatgaatttaggtttaatacgttttggggttattaaagtttgacgttattatgatttgatgtgtgacgtgttataggtgttttttggtatttttacggaattggttttaggattttaaaatttgtgggtgtttaagtttttgagataaaatggtgtaatatttgtatataatttatatatattttaaattatttttagattatttatatttaatataatggaaatgatatgtcggttgggcgtggtggtttatgtttgtaattttattattttgggaggtcgtggtaggtggattatttgaggtttggagtttgagattagtttgattaatatggtgaaatttttatttttattaaaaatataaaaattagttaggtgtggtagcgtatatttataattttatttatttgggaggttgaggtaggagaattgtttgaatttgggaggcggagttcgtagtaagttgagatcgcgttattgtattatagtttgggtgatagagtaggattttattttaaaaaaaaaagagaaaaagaaaaagaaatgttatgtaaatagttgtgattttgaattgtttagggaataataagaaagaattatttgtagatgtttagtatagatgtatttatcgtaagtttaattatattgtataatttagtaacgatgtaatatttttaggggtttttttgttttgttttttgagatagaattttagttttattttgttatttaggttggagtatgttggcgtgatttttgtttattgtaatttttattttttgggtttaagcgatttttttgttttagttttttgagtagttgggattgtaggtgtgcgttattacgtatggttaatttttgtatttttaatagagatggggttttattacgttggttaggttggttttgaatttttgattttgggattcgtttatttgggttttttaaagtgttgggattataggcgttagttatcgcgtttaatatattttgatttttggttggatatggagggttgattgtatttaatatttttaagttttagtttttttttttaaaataaaggtgtggttgggtgtggtggtttaagtttgtaattttagtatttagggaggttgaggtgggtggattagttgaggttaggagtttaagattagtttgattaatatggtgaaattttttttttgttaaaaatataaaaattagttaggcgtggtggcgagcgtttgtagttttagttatttgtttgaatttgggaggtagaggttgtagtgagttgagatcgtgttattgaattcgagtatgggtaatagagtaagattgttttaaaaaaaaaaaaaaaaagggggtgagtagacgtggtggtacgtttttatagttttagttatttagtaggaggttaaggttggaggattgtttgattttaggagtttgagtttagtttgggtaatatggtaatattttatttttaaaaataaaataaaagtaaaggtattaattattattttggatggttgttgtaaagaaatatatataaaataatggagagttttgtaattggtttttaagaggtttaatagatattattgtttttgtttttttattatgagttatttttttggttattttattgaattagttgggttagttgagtttgggagaagagttgtttaggaagtgagaggttgttttttatagagatttaaggtttagttttttttggtgatttagatgggtagtttagtgggtatacgtggtttttttttatatgtggttgagttttatttttagaatagatggagaggtaagggtagggtttagtatgtttgaggaattttagagggttttggtggtgtgggggatttttagaatataggtgttttaagggttgatttagtttttgtgtttttttttttgggtgaggaggggatatttatgggtagatggtgatttttggggaaggtagtttagattttattggttattatatttttttttttataatttttttatttttgtggttttttatgttattatgtggtcgtttttcgtaaggttttagcggggtgtaggtatgaatatagtgttaggtaaggaggtatttggaggggaattttggttttttttggggggattttttttttgtattttagttttgtttttttttatggttattgatgttttttttttattttagaggtggtttatatttgtatagattagatttataaaaattacgtttttttgatttttataagtttgtttagtgaggtttaggtattaggttatgtgttggggatttagatttatatatatacgtatgttagtatttatgtttataggttcgtatatgttggggtaagtgttatatacggggcgttgtaggaagttgatttttagtttttgtagatttttgtttgtttggatagggaggtgttgagaaggtttaggtagttttgggttaggattttggtttggggttagggtattgagtgattttagaattaagggtggcgtgggtttaagtagttgttagacgttttttggtattttgtaggtagattatgtggattttggtgagttgggtggttttaatagtagggttggtggttggaacgcggtgtttagatggttagttttgttttgtggtttgttgtttggatttcggaggagttagttatagttgttgtcgtttttttttggtgagtgttttttagtttaggtaagagttggtagtttgggtttttttaaagggttattttggattggttagaggaggacgttaggtataagtttgtggtttattattttttttgtttttttaggataaatggtttataatattgagtaggtatttgggtggtttttgttaggttgatgtttattgttttgtcggttatttttgtatttttatcgttttagggatttttagttgttgtttttttttagaggtgagcgtgttattagtttagtggaggggtttaggtttgtatttatgttttttttgtattttattatttgtagataaaagggttttgttaatgtaggtttttttgtgttttataggtcgtggtatgcggggatggttattattgttgtttacggggtttttattgtagtgtagacgggcgattttgtttttaaagattaggtgtagttggggtgtgggtgtagggtaggtagacgggtagtatgtggagtttggaatttaggagtttagttggcgggggtagttttgatttttgtttttgtgtttttatttatgtggtatttgtattaagtaatagttttgttgtggatagaggggtagtattggggataggagggtgcgggagaaagtgtaagattttaggtttaggcgttgtgggggtggggagaggtcgagttgggtcggtttaatattaatttatggttagtgggtgttttttttttatgttattttgttgagggagggattggattgtgaggagggtgagttaggtttgtttaggagattattgagttttagtgttatttttaaattttagtagttgggtttgtaggttttggtgttattagttttttgtgtgatgggggagttattttttttgagtgggttggtagtattttgggttattttgtttataggtaataatttcgtgggtgttatttagtgttttgatagttagttcgaatgttcggatttttttacgtgttgtgttatggtcgatggtttttgggggtgttgttttatgttttaggtataaatttgggggagatgggggtatgtggagggaagtgggggtagagttgggggttaggggtagggggtgaagacggagttaggattatttttttttaggttttttgttgtgaagatagggtgtattgttgttcgtacggtgttttttgcgatttggtttatattcgttgtattatatttacgggtatttattttttggtaaagaagttttttgtttagaggattaatagggtaggtgaggaggtgggagagtattaggttaggggttggggcggggttttattgattttaagtgtaggaaaaagttttttttattttggttgttttttacgtttgttttttttttagtggttttgtttagttcggttatgtgttcggacgtacggtttcggtgttttgatggttttatttgttgtgagttgtttagtgggaagtatggttgttgtttaatgtttaacgtgagtgaggggttggagttagtttggttgtgtgtttttagttatttggttttgatacgtattttataggggttttgtggtatggggttggttggttgtttgttgggagtttggttgatgtagggtttatgttattttttagtgggggattggggtagtgttagttattagtttggttgttttttgtgtgttattgagtttggaagtgataaagatttatttttgtttttatttaggttatttgttgtttcgattatttgtattgttgtttttaagatattgtgtgtgatttgatttagagtaagtgtttttttaaggagaacgttattacggatttttttattaagttgtttgcgtatataggtattagaggtagggtgtagatataggggtggggttttttttttttttttttaggtttggttttaggattattgtaaggtggtgtaagcggtattttttatttttaatatttggttttagttgtggagtcggtaaagggttgatatttttgagggtttttagtgttatttttgatttgttttttttgttttttttatagtgggggatgtgaaatgtgatatggaggtgagttgtttagatggttatatttgttgtcgtttatagtcgggggtttggggttgttgtttttttatttaggtatttaggggtggcgggtgggtgggttgagtatagtgtggtaggtagtcgggttttagtgtttatttgtttttttttatttgttttaggttgtgtgttgtgaggattatatatattgttgtttcgcggggtttacgtgtgatacgtagaagggtatttgtgaataggggttttattaggtgttttggatggagaaggttttagtttattttagtttgttagatttataagttttgaagagagatgttttttgtgataatgttagtagttgtttttttttcgatatttgttgttaatttacgtttggggagtggggttgttgtttaattttagaggtatatgggaggggatagtattttggtttgggtaggtgggtggttaagtttttattgttttttgtttttcgtatagtttataggtgatatttagttttgatagattcgtttttagttggaggtgttgtaagtaggagaggcgggttggagtaggtaggggttcggtattgcgttttatatagtggttatttataacgtttttttttgtttattttttaggttgtttgttgttcggattattagtattgttgtttttagggttatacgtgtgtagttgaggggtagtgttagcgaggaagcgagatcgtggttggattggagaagatgtttgttcgtcgggtttttttattttattttagagatatcggttgtgattagtatattagttgttcggtggggtagatttgttgttcgagtttgggtgggagttgggtttgttgttagttgttttatgtgagtgtttttttgtttgtttttggataggggagttaagtttagtgaggggataggaatataatgttattttgtgttttttttttcgttaggttgtgtgttgcgaggatcgttagtattgttgttcggttggttatatttgtaacgtgaaggttcgattttgcgagaaggaagtggtttttgtttagtttgttatttttttggttcgtagtttttacgtgggtgtgaaggacgtggagtgtggggaaggatatttttgttatgataattagatttgttgtcgagataatcgatagggttgggtttgttgtttttatcgttaggttagtgttaatttttattttggggttgggtatggttagggattaggttttatttcgtttaattttttcgtttttttttgattatttagggcgtttgttgtgttgatcggcgttattgttgttttgttggttttcgttgcgtagttaggggtattaagtgtttgcgtagggaggtttcgcgttgggacgtttttttgagggatttagttttgagatagttgttgtgagggatagtattgaagattttgtagttttcgggattttattcggagggtgttttttgtttaggtttttttagtatttttttttaattaaattttttttggattttattttgagttttttattattatgggaggtggggttttaatttaaggttttttttgttagaagggggttgtggtaaaagttatattataagttgttatttttttttcgttttagtggattttgtggttaggtgtttttttttatttataggggtgtttgtgtgtgtgcgcgtgtgcgttttaataaagtttgtatatttttttaatagtgtttgatttgtcgttttgtttgttttttttagggttttagaataggggtttacgtttattgttaatattttttttttttattttatagaaagatatatatagttttaattttattagttttatatttgttgttgtttatatcggttgtattatattattttttagtttttagagttgttttagttattagttttgtgatatcgtagtttagagatgggttagttagtaagtagtattttttttttttttaggggtttataaagaacgttttttttttttttagtttttatattagtagttgaggttgggttattttttttgtttttttataatagagttttttatgtatagttacgtttatataggtattgtttttttttagttttttttttcggtattttttcgtgggggtttggattttttttttttttcggtttggaggtagatatagggttttttgtaagatacgatttagtattaattacggaatagttttaaggtttttgggttttttttcggtttggggttgggagttacgcgcgagggttttcgcgggttttcggggcgcgtattttgggtgcgggttcgcgcgggaggggcggtgttaggttttgcgcgggcgttatttgacgttgaatattattagcggtcgtttttttcgtcgttgttacgggttttttttgtttttcgtttcgtcgtttattttcgtttttagttcgtttttcgggttggtgagcgagtcgcgtcgtagttcgttggcgttgttgcgggagttgttttcgcggttgcggtttcgttttcggggtatcgtggtcgttcggttttcgggcgtcgttatttcgtttagtagcggcgttagcgagttgtttttcggagagtagaggttcgtgcggttttcgttgttgttgggtttcgtgttttcgttgagcgttaggcgcgggggcgcgggcggcggcggcggcgcggtaggcggggcgcgttttcgtttttttttcgcgggtcggcggcgcgcgggtcgcgtttcgtggatatttacgttcgagtttaggttggcgtcggtgttgcgtgtttcgtcgttcgtttgtaggtcgatgtaagagtggcgtatttgcgagttggagcgttcgtcgagggatacgaattaggcgcgcgggtgcggttttacgtttagttttagtagttttttttcggttagggtttgtagtttttcgttgagttgcgttatggtggattcgttgaatagtatagggatggtgattgagttattgacgggcgtcgcgcgttcggttttttagttttcgtcgtcgttttcgtcgttttcgtttttcgggttcgagtggttcggtatttgcgggcgttgggggtcgggttggggaaaagcgcgcgtcgggtcgggtgtcgtgtttttcggcggggtcggttcgtcgtttacgtcggcggcgttcgtttcgtcgtcgaggcgtacgtagtgcgcggggattattagggtgggtatgacgttgcggtagacgttgtttttgaggtggtcgatggagtcgtagaagatgagttgtttcgtttggtttagcgacggcggtcgcgttagttggtttatcgattgcgatagtaggaagtcgggggttttgttttcggtcgtttttttgtggtttaggtagtggtcgaagggcggcggcggcgagggcggttcgtgtaggaaggtcgtagttttcgagggttttcgtcggtgtttttttaggtcgggttttagttcgtcggggttttcggtcgagcgagcgtttttgagttcggcgttttcgttttcgcgggtattcgaaggttcggcggtcgggcggttggtagagcgcggtttggtgcggaagaagttatttcgggaggaggttaagtttcgggagttggagaaggtcgagtggagggggtttggaggcggagtttcggggtttttcgacggggcgggttttaggggttttttatagatgaggtggagttgggatatcgaggtggtttggtttcgtttgttatcgttagagggtttcgagagttgtagtttgcggtgttgttgtttcggttttaggtagcgttttttggaagggagggagtagaaggggtcgtttaggaaagggtgagggttaaagtaggtttcgaatttttttagatgtaagataagagacgaatatagtggaagaggtggggagaatgtttggggcgtttaggagagatggcggggagtcgtcgtgttcgtttggcgat

SEQ ID NO: 142 - DNA, 10857 bp, Artificial Sequence
  chemically treated genomic DNA (Homo sapiens)
atcgttaaacggatacggcggtttttcgttattttttttgagcgttttaggtattttttttattttttttattatattcgttttttgttttgtatttaagggggttcggggtttattttggtttttatttttttttgagcggttttttttgtttttttttttttaggaggcgttgtttgaagtcgaggtaatagtatcgtaagttgtagttttcggggttttttgacggtaataaacgagattaggttatttcgatgttttagttttattttatttgtgggggatttttggaattcgtttcgtcgggggatttcgaggtttcgtttttaggttttttttattcggttttttttagttttcgggatttggttttttttcgggatgatttttttcgtattaagtcgcgttttgttagtcgttcggtcgtcgagttttcgggtgttcgcgggggcgagagcgtcgggtttaagggcgttcgttcggtcgagggtttcggcgggttggagttcggtttagaggagtatcggcgggggttttcgggggttgcggtttttttgtacgagtcgttttcgtcgtcgtcgtttttcgattattatttgggttataagggggcggtcgagggtaagattttcgattttttgttgtcgtagtcggtggattagttggcgcggtcgtcgtcgttgggttaggcggggtagtttattttttgcggttttatcgattattttaaggataacgtttatcgtaacgttatgtttattttggtgattttcgcgtattacgtgcgtttcggcggcgaggcgggcgtcgtcggcgtgggcgacgagtcggtttcgtcggagggtacggtattcggttcggcgcgcgtttttttttagttcgatttttagcgttcgtagatgtcgggttattcgggttcggggggcgagggcggcgggggcggcggcgagggttggggggtcgggcgcgcggcgttcgttagtggtttagttattatttttgtgttatttaacgagtttattatggcgtagtttaacggggagttgtaggttttgatcgagaagaagttgttggaattgggcgtgaagtcgtattcgcgcgtttggttcgtgtttttcgacgggcgttttaattcgtaagtgcgttatttttatatcgatttgtaggcgggcggcggggtacgtagtatcgacgttagtttggattcgggcgtagatgtttacgaggcgcggttcgcgcgtcgtcggttcgcgagggaggagcgggagcgcgtttcgtttgtcgcgtcgtcgtcgtcgttcgcgttttcgcgtttggcgtttagcgaggatacggagtttagtagtagcgagagtcgtacgggtttttgtttttcggaggataattcgttgacgtcgttgttggacgaggtggcggcgttcgagggtcgggcggttacggtatttcgggggcggggtcgtagtcgcggggatagttttcgtagtagcgttagcgagttgcggcgcgattcgtttattagttcggaggacgagttgggggcggaggtgggcgacgaggcgggagataagaagagttcgtggtagcggcgggaggagcggtcgttgatggtgtttaacgttaagtagcgttcgcgtagggtttggtatcgtttttttcgcgcgggttcgtatttagggtgcgcgtttcgggggttcgcgggggttttcgcgcgtagtttttagttttaggtcggagaggggtttaggggttttggagttgtttcgtggttggtgttgggtcgtgttttgtaagggattttgtgtttgtttttaagtcggggaggagggggggtttagatttttacggggaggtgtcggggaggagggttggggggaagtagtgtttgtgtagacgtggttgtatatagaaagttttattgtgggaaagtaggaggggtgatttagttttagttgttagtgtgagggttgggaagggagggggcgttttttgtggatttttgggaggggagggggtgttgtttgttgattagtttatttttgggttacgatgttatagggttggtggttgggatagttttggggattagggggtaatgtgatatagtcgatgtgggtagtagtaaatataaaattggtgaggttaaggttgtgtatgtttttttgtggggtaggggaggggagtgttggtagtggacgtgaatttttgttttggggttttggggagggtaggtagggcggtaaattagatattgttaagaaagtgtataaattttattgaaacgtatacgcgtatatatataaatatttttgtggatagggaaaagtatttggttatagggtttattgaaacggggaggggatggtagtttgtaatgtggtttttgttataatttttttttgatagggaaggttttagattgaggttttattttttatggtgatggggagtttagaatggggtttagggagaatttggttagggggaggtgttagggaggtttgagtagagggtatttttcgagtggggtttcgagggttgtagagtttttagtattgttttttatagtagttgttttaaggttgggttttttaaaggggcgttttagcgcggggtttttttgcgtaaatatttggtatttttggttgcgtagcggaagttagtaggatagtagtggcgtcgattagtataatagacgttttggatggttagaggggggcgagagggttggacgaggtgggatttggtttttggttatatttagttttaggatgggggttggtattgatttggcggtagggatagtaggtttagttttgtcggttgtttcggtagtaggtttggttattatggtagaagtgtttttttttatattttacgttttttatatttacgtgagggttacgggttaggaaggtggtaggttgggtagagattatttttttttcgtaggatcgagtttttacgttgtaggtgtagttagtcgggtagtagtgttggcgattttcgtagtatatagtttggcggggaagggagtatagaatggtattatgtttttgtttttttattgggtttagtttttttatttaggggtaggtagggaggtatttatatggggtaattggtagtaggtttagtttttatttaggttcgggtagtaggtttgttttatcgggtagttggtgtgttggttatagtcgatgtttttggggtgggataaggaagttcggcgggtaggtattttttttagtttagttacgatttcgttttttcgttgatattgttttttagttatatacgtgtagttttgggggtagtagtgttggtggttcgagtagtagatagtttggggggtgggtaggaaagggcgttgtaggtagttattatgtggggcgtagtgtcgagtttttatttattttagttcgttttttttgtttatagtatttttagttggggacgaatttgttagagttgggtattatttatgggttatgcggagggtagaaagtaataggagtttggttatttatttgtttaggttaagatgttgtttttttttatatatttttgggattggatagtagttttattttttagacgtgagttggtagtaggtatcggaggagggatagttgttgatattattataggggatatttttttttaaggtttgtgggtttggtaggttgaggtgagttggggttttttttatttagggtatttggtggggtttttgtttataggtatttttttgcgtgttatacgtaaatttcgcgggatagtagtgtatgtggtttttatagtatatagtttagggtagatgaagaagggtaggtgggtattggggttcggttgtttgttatattgtgtttagtttatttattcgttatttttgggtatttgggtaaaagggtagtagttttaggttttcgattgtagacggtagtaggtatagttatttgggtagtttatttttatgttatattttatattttttattgtgagggaagtagagaggataggttagaagtggtattggggatttttaggggtattaattttttgtcggttttatagttggaattaggtgttgaagatggagggtatcgtttatattattttgtagtgattttaaggttaggtttaaaagggaggaaagggggttttatttttgtatttgtattttgtttttggtatttgtgtgcgtaggtagtttagtgaggaggttcgtggtagcgttttttttggagaggtatttattttggattaggttatatatagtgttttgggggtagtagtgtaggtgatcggagtagtaggtggtttgagtggggataggggtgggtttttgttatttttaggtttagtagtatatagggagtagttaggttgatggttggtattgttttaattttttattagggggtagtatgaattttgtattagttaggtttttagtaagtagttagttagttttatgttatagagtttttgtaaggtgcgtgttagggttaggtggttgggggtatatagttaagttggttttagttttttatttacgttgggtattgggtagtagttatattttttattgggtagtttatagtaggtagaattattagggtatcgggatcgtgcgttcggatatatgatcgagttggataaggttattggaagaggagtaaacgtgaggggtagttaggatggaggaaatttttttttatatttggagttaatgaggtttcgttttagtttttggtttgatgtttttttatttttttatttgttttgttagttttttgggtagggagtttttttgttagggggtgggtgttcgtgggtgtgatgtagcgggtgtgaattaggtcgtagaaggtatcgtgcggatagtagtgtattttgtttttatagtaggaagtttgagaaaaaatggttttgatttcgtttttattttttgtttttggtttttaattttgtttttatttttttttatatatttttattttttttagatttgtatttggggtatggggtagtatttttaggagttatcgattataatatagtacgtggagaagttcgggtattcgaattgattattagggtattggatggtatttacggagttgttatttgtggataagatgatttaggatattattagtttatttagggaaggtgatttttttattatataaggagttggtggtattagggtttgtaagtttagttattggggtttgagggtgatattaaggtttagtgattttttaggtaggtttaatttattttttttataatttagttttttttttagtaagatggtatggggaaggggtatttattgattatgggttggtattagatcggtttagttcgatttttttttatttttataacgtttggatttggagttttgtattttttttcgtatttttttatttttagtgttgtttttttgtttatagtagggttgttgtttagtatagatgttatatgaatgagggtataagggtaggaattagggttgttttcgttagttgggtttttgggttttagattttatatgttgttcgtttgtttgttttgtatttatattttagttgtatttgatttttggaagtaggatcgttcgtttgtattgtagtggaagtttcgtgggtagtagtgatggttattttcgtatgttacggtttgtggaatatagagaaatttgtattggtagggtttttttatttgtaggtggtagagtgtaggaaaagtataaatgtagatttaagtttttttattgggttgatggtacgtttatttttgggaaggggtagtaattggaagtttttgagacggtaaagatgtaggagtggtcggtagagtagtgggtattaatttggtaggggttatttagatgtttgtttagtgttgtgggttatttgttttagaaagatagggaaaatgataaattatagatttgtgtttggcgtttttttttggttaatttaagatgattttttgggaaaatttaggttgttagtttttgtttaggttgaggggtatttattagaaggggacggtagtagttgtagttggttttttcggggtttaggtagtaggttatagggtagaattgattatttgggtatcgcgttttagttattagttttgttgttaaggttatttagtttattagggtttatatggtttgtttgtaaagtattaaggaacgtttggtaattgtttaagtttacgttatttttgattttagggttatttagtattttagttttaggttaaggttttggtttaggattgtttgagtttttttaatatttttttgtttaggtaggtagaaatttgtaggggttgagagttagttttttatagcgtttcgtgtgtgatatttgttttagtatgtgcggatttgtaagtatgaatgttgatatgcgtatatgtgtgggtttgagtttttagtatatggtttaatgtttgggttttattgggtaggtttatgagagttaggaagacgtgatttttgtgggtttgatttgtgtagatgtgggttatttttggggtgaggggaaggtattagtagttatgggagaggatagggttagggtgtagggagggagtttttttaggaaaagttagggtttttttttagatgtttttttgtttgatattatgtttatatttgtatttcgttaaggttttgcgggaagcggttatatgatgatatgggaaattataggggtgagaaagttgtgaaaaaggaaatatggtggttagtggagtttgggttgttttttttagaggttattatttgtttatgaatgttttttttttatttagagaaaaggatatagaagttgggttagtttttgagatatttgtgttttgagggttttttatattattagggttttttgagattttttaagtatgttaaattttgtttttgtttttttatttattttggaagtgaaatttagttatatgtggagagagattacgtgtgtttattgggttgtttatttgagttattaggaggaattgagttttgagtttttgtggagagtagttttttattttttaaataattttttttttaggtttagttagtttagttagtttagtggggtggttagagaggtaatttataatgaagaagtaaaaatagtaatgtttgttgagttttttgggagttagttataagattttttattattttatatatatttttttgtaataattatttaaagtagtaattaatatttttatttttattttatttttagagatgaggtattgttatgttgtttaggttggatttagatttttgggattaagtaattttttaattttggttttttattaagtagttgggattgtgggagcgtgttattacgtttgtttattttttttttttttttttttttgagatagttttgttttgttgtttatgttcgagtttagtggtacgattttagtttattgtaatttttgttttttaagtttaagtaagtagttgggattataggcgttcgttattacgtttggttaatttttgtatttttagtagagagggggttttattatattggttaggttggttttgaatttttgattttagttgatttatttattttagtttttttaagtgttgggattataggtttgaattattatatttagttatatttttattttaaaggaggaaattgaagtttagagatgttaagtatagttagttttttatatttaattagggattaaaatatattgggcgcggtggttaacgtttgtaattttagtattttgggaggtttaggtgggcggattttaaggttaggagtttaagattagtttgattaacgtggtaaaattttatttttattaaaaatataaaaattagttatgcgtggtagcgtatatttgtaattttagttatttaagaggttgaggtaggagaatcgtttgagtttaggaggtggaggttgtagtgagtagagattacgttaatatattttagtttgggtgatagagtgagattgagattttgttttaaaaaataaaataaaaaaatttttgaaaatgttatatcgttgttgagttatataatgtagttaggtttacgatgggtgtatttatattgaatatttatagatagtttttttttattattttttaaataatttaggattataattatttatatggtattttttttttttttttttttttttttttgagatggagttttgttttgttatttaggttgtagtatagtggcgcgattttagtttattgcgaatttcgttttttaggtttaagtaatttttttgttttagttttttaagtaggtgggattataggtgtgcgttattatatttggttaatttttgtatttttagtagagatgggggttttattatgttggttaggttggttttaaattttagattttaggtgatttatttgttacggttttttaaagtggtgggattataggtatgagttattacgtttagtcgatatgttatttttattgtattaggtataagtaatttagaaatgatttaaagtatgtataggttatatgtaaatattatattattttattttaggggtttgagtatttatagattttggggttttggaattagtttcgtgaagatattaagggatatttataatacgttatatattaggttatggtgacgttaggttttgatggttttagagcgtattggatttgggtttatattattagtggtacgatgggtagtgtttgggaatggtgtaataggtataatagaaatagggtatagggattgtttgaaaatcgtatttgggttttaattttagaattgttaattgtgagggtttgagaagttgttttttgtttgtgttttagttattttacgagtttaggtgtggatattattgcggggggaggggtaggaaattttatttatttagttatttatattttttttgttttatttggttttttttaagtgttttttttttaatttagtatttttaagaggttattttttggatagataaggatgaagtttattggttttggatagtggattttttttttagttttatagtttttaggtaaagtatttgtagttggtatcgtttgttttttgggtgtttttagtaggttgttcgttgttatggtttgttgggaaggggagtttgtttgtataggagtgttcggttttttggtgaattatttgtgtatgtggttttttttgtttattttaaattgagggagtatagtgtatgtttttattgaatataagtattcgtatatagaaatagggatgaggaggcgagtcgtagttttttatgttattttatatcgttaaaatagttagaggggatagtagtttttttaagattttagtttcgttattttttattaggtggtattttttaatttcgagtgttaaggggagaggaaatttttaaaaggggagttaatttagttgtaaatgagtaggaaaaagtggttgggagaggcggaagttagttcgttttattcgtaataagaggaagtaaggaggagttagattaggtttagttattatttttaagtttttattattttcgagaagttaaggttttaggtttcgtttttaggttttcggagtttttagtttagggtcgcgcgttttttcggttttaggtcgtcgcgggaattatttattattattaggagaggggaagaagttagtatttatcgataggggtggagttgggttaagaatggtgtggtttttgttttgggggaatgttggggaggtagaaagttttttttaacggggcgttattgtaattattgtttttttttttttataaaattttttttagtgtattagaatttttaaggagttttagtaagcggtttttttgttgttttcggttgagattttaggggaattttaagtttatatggttttggcgggtttttgggtaggagtaggcgagaggtttgcgcggtcgtttttttatttgcgttcgatttcgcggtttttgggtagtagtaatcgggtagcgtttagattatagattttagcgcgatgattcgtttattttagtttttattggttagggattagggttattcgtttttattggttatttattaatatagaggtggggttagtttggaatgttgtgttttttttttatttaaattatttttttttttgttttttttcgttttatattttatttttagggattatgtgattggagaattatgtgacgtcgggatagttttagtagggtagttggtgttcgtcgttttttttaatttattttgtaggcgtttgggggagtttgttagagatgatagcgcgtgtttggggtattgatagtgcgagggagtgttatgaattgggaatatttgtgttcgtttttttatttttttgtttgtttgttttgagacggagttttattttgtcgttaggttggagtgtagtggtacgatttcggtttattgtaatttttgtttttcgggtttaagcgatttttttgttttagtttttcgagtagttgggattataggcgcgtattattacgtttagttaatttttgtatttttagtagagacggggttttattatgttggttaggatggtttcgattttttgatttcgtgattcgtttatttcggttttttaaagtgttaagattataggtatgagttatcgcgttcggatttgtgtgtttgttttagagatagggtttcgtttagtcgtttaagttgattatagtttattgcggtttgtaatttttgtttttaaagcgatttttttatcgtagttttttaaggcgttggga

SEQ ID NO: 143 - DNA, 5465 bp, Artificial Sequence
  chemically treated genomic DNA (Homo sapiens)
tttcggatttggtaaggtgcggtggtttatgcgtataattttagtattttgggaagtttaggtgggtggattatatgaggttaggagttttagattagtttggttaatatggtaaaattttatttttattaaaaatataaaaattagtcgggtatggtggtgtatatttgtagttttagttatttgggaggttgaggtaggggaatagtttgaattcgggacgtggaggttgtagtgcgttaagatcgtgttatttcgttttaatttgcgtaatagagtgagattgtttaaagaaaaaaaaaaaattttagatttaatgttagttgtttgtgttagtttggggattttttatttatagggtgtagtttggttaagaggaaggagttatataatatggttgatggaatttttaatatttaagtttaggggtatatgtgtaggatgtgtaggtttgttatataggtaaatgtgtattatggtggtttattgtatagattattttattatttaggtattaagtttagtattcgttagttattgtttttgatgttttttttttttttattttttattttttgatacgttttagtttgtgttgttttttttatgtgtttatgtttttttaggttgatgtggttttgagtgatttttttttgttttttttttttaaaaataagatttaaaaggttatgttttttatgggttggaggtgttgtttcgatttgttaagtatagtttaggatttagaggttgttgtggtgaattattgtaggtatttggaagttattaaggtgtttttttttcgtattttagttttaagtgagggaaataagtttatggttaagggagaattatttattaatttgaatttattaaaatatataaatgtgtttattagaaatggttggttggagaagtttagtattaaattatttcgtttttgaaatttattagttttatgaaatagttcgttagagagagatttgtaatttttgaattcgttgattattaatttgtataggtgtttcgtgtttcgagatttgagaaaatgataaaatacgtttatttttcggtcgggtatagtgatttacgtttgtaattttaatattttgagaggttaagttgggtagattatttgaggttaggagtttgagattagtttggttaatatggtaaaattttcgtttttattaaaaatataaaaattagttgagggtggtggtgggcgtttttaattttagttatttcggaggttgagttataagaatcgcgggaagcggaggttgtagtgagtcgagatggggttatagtattttagtttgggcgatagagtgggatttagttttaaaaaaaaaaaaaaagtattttttaatttttcgttagtttttgttttttttttatttcgttttttttaggtttttgaaaagtattttttttaattttttttgtgtatacggggaaaatacgtgtttatttttattatggcgttgaaatttatttttttttttaaatcgtttttgtagatcgttttagtataaaatgtggtaagaggttaaagggagagatatagattagttttttggttttcgttttttaattttaagttatatttgtgaaatttatgggtttttttatagtttttaaaaattaagggcgttttttgttttttttttagatgttttttttttatcgtcggtagcgagtgggagatagtttagcgcggggtaggggagtattgggttcggagatggaaggtagcgttaaaagcgtcgttggaaaatttttgagcgttaatcgttgtttgtgtgagtttttaaatttataaatttttaatatttgtagtttttgggttttttaggatttttatcgattttggcggtagagagggtaggtttgagatgtagtgatttgagggtatatggttaatttttgttattttaagattatattggggaattagattgatttttttaattttgaattcgtttcggtttcgggcggtttaaagggttttttttgtcgtattttcgttaaaattaaatcgtttggtataagtcggtaagtaattattttgttgggagagggaaggaagagtaggcgtagttttagattaatttttttgtattgttttttttagacggttaagttagttgcgttttatcgaaaagggcgtatcgtttacgttcgaaacgtagtcgttgggggtcgagaaattatttttatttggttcgagggttagggacgtaggagcgtagtagcgtggaggggtttcgcgttggttcggcgttgttcgcggttttgttttcgttttaagggtacggcgtcggtacgaggatatcgacgttgtggcgtaattgtcgtttttcgtagtaatttcggagttcggttttcggtcgtttttcggttttgcgtaggttgttttttttcgacgcggagttttatttcgttattcgtcgtttagacgattttataaataagttttcgaagtgcggaggtaggaggcggggcgtagcgcgggggtaggaggcgggttagggttagggtagaggttgcggtcgcgcgtttttattggtcgggacgtagtgagtcgttcggagttcggcgcgggcggggtttgtcggcgcgtgttcgtttatatattcgcgtcggtgttcgtttttcgtttttcgcgttcgtttcgtgttcgttttaagtcggtcgacggagtttttaaagtgggttgtcggtcgcgggagttttatattcgcgagcggatcgttatacgggttcggtgttcgttgcgttttcgttttagcgtttttgaggcggtcgtataattttcggtagtgttttgagattgtatggttagtttagttcggttttcgatttttttcgatttttagtattcgagttatttttttttttttttgaaaatttagaaaagtgattttttttttagggaaaaaggaatttgggttttttttttttcgtttttttttcgggtttgatagtttttatttatttttttttcggatttcgttttcgcgcgtaggttttttttagttatttttttttattttcgttttcgtatttagttcgtcgcgcgttattttttatttgattgcgcggggcgttcgggatttgcgcgtatttcggatttttattattcgttcgggtcgcggggagcggacgagggttatagttttttattcgttagggagtttaggtgttcggcgtttgaacgttttaaagggttatagcgataatgatagttgataaggagaagaaaaggtaagcgggcgttcgggtcgattagggggtcggttcgaggttagggtcgggttgcgcggggtaggcgcgatcgagagtggttgggagaagagtgttgagaggttttcggagttcgaggttcggtttggagggttgtgagggggagagtatgtgttcggtttgggggcgcggattagtagttttgtagtggagatttttgcggttcggaggagtcggggatttgcgcgtacggcgaggttaggaggtcgagggagatggtttggaggtcggaggtgttttcgcggtgtttttgaaaattttttagtcgtttcgtagtagattatcgtggttatcggcgtttggaaatgtttgtgggtgtatgttttcgattttttttggttttttattttggggtagtatttacgtttttatttttttttggattcgcggagtttttttaaatgcgtttttgtgttcgcgtcgcggtttaagtgggtaaaggggggcgggaggcggagagcggtttagggatacgattttatcgaggagttaggattttttagagcgtttcgttgtcgggttttagattttatcgaaggttggagaatttattttttcgtgtcgtattttgattttggggagagtaggtagtgagtgatttggattgttttgcgggggtagatggttcggtgtgtaggaagcggacggtaatattggatgtttttggtaggttcgggtgtttgttttcgaagaggatagagaagggtagttacgatttgttcgtttgttttcgcgagtttttcggtattgggtgagaggtaattttggttattttttgttgttttttcgttttttttcggtcgtttttagtttagtcgggttcggcgttattcgagcgagggttcgagttttttgcgcggtcgcgtagaagtaggtagggttttaatttttgtaaatgtgtgcggttcgtcgtttgttttttttttttttttgtttttattcgtgcggttttagtggtttggagtttttagtttcgcgtttggtcgcggtttggcgaggttatgttgcgggaagttggaatttaacgcgcggtcggttgaatcgtttgagtcgcgggaaattagcggcggagcggcggtatagaggtgcgaggatgaggaggatcgattcgttaagggagggaggtgattggtcgggagggtttattgtcgaggttgatttgtttttgttttaatttttattacgggattggagttagaaatcgtgtatttttcggtcgaaagtagcggtttttatttcggggtatcgataaggatttgataaacgggagcgaatcgcgtttgttttggttcggcgttcgggttttttattgcgggatcgttaggggaggggattgggttttgttttttttttttggtcgtagttttttttttttcgttatcgtcgcgtttttagatttaagataagtgagggagttttgagattgtagtcggtatatttttagggttttcggagtagttttggggttttatgttttttgaaggtagtagagtaaggaaaagatttttaagattttagtgcgttttgtaaaaattaattataatgttaataatgattgaattatcgaaaagtaaagttatagatagcgtttgtagacgttttcgggttcggagtcggggagggaatttgtgtattttataattgcgatgtttatcgggaatgtggtaatcgtcgaggtggggtttgatagtaattttgataaatgtgtgaagtgttagttttttttgcgttttttagcgtcgggttttgtgtagttttgtatcgtatatatcgagaaatttgggagtaggggaaaaatgatttcgatatatttagttatagtatttggttcgttagcggattgttggaaagagagaagaagcgggaatgggagcgggaagaacgttgcgtaattagatttttaattattggcgagagcggtcgttttaagaattattgtggggattgtttgcgaaacgttttggaggtcgttgtgtgagttgcggtttcgggttggtggttacgcgagggtgttcgtttttttcgatttgtttggatttttgtgttgtagaatggtagggtaaatagcgtgttttttattatttagagttttttaaggggttgtttaatttttattgggttaattagtttgagatttatttatttttcgtgtttgg

SEQ ID NO: 144 - DNA, 5465 bp, Artificial Sequence
  chemically treated genomic DNA (Homo sapiens)
ttaggtacgaaaagtaaatgagttttaaattgattagtttaataggaattggataattttttaaggggttttagatggtgaaggatacgttgtttgttttgttattttgtagtataaaaatttaggtaggtcgaagagggcggatattttcgcgtggttattagttcggagtcgtagtttatatagcggtttttaaggcgtttcgtaggtagtttttatagtggtttttaaagcggtcgttttcgttaataattgggagtttaattacgtaacgtttttttcgtttttattttcgttttttttttttttttaatagttcgttaacgaattaggtattgtagttgggtgtgtcgaaattattttttttttgtttttaagtttttcggtatatacggtataaaattgtataaaattcggcgttaaggagcgtaggaggagttgatattttatatatttgttaagattattgttaggttttatttcggcgattgttatattttcgataggtatcgtagttgtaaaatatataagtttttttttcggtttcggattcgaaagcgtttgtaggcgttgtttataattttgtttttcgatggtttagttattattagtattatgattggtttttataaaacgtattggaattttaagagttttttttttgttttgttgtttttaaaagatatggaattttaggattgtttcgagggttttgggaatgtgtcggttgtagttttagggtttttttatttgttttgggtttgagggcgcgacggtgacgagaaaggggggattacggttaggaaaggggagtagggtttaatttttttttttagcgatttcgtagtgaagggttcgggcgtcgagttaggataggcgcgattcgttttcgtttattaaatttttatcggtgtttcgaggtgggaatcgttgttttcgatcggaggatatacggtttttggttttagtttcgtagtggaagttggaataagagtaaattaatttcggtagtgagttttttcggttagttattttttttttttagcgagtcggttttttttattttcgtatttttatatcgtcgtttcgtcgttggtttttcgcggtttaggcggtttagtcggtcgcgcgttggattttagtttttcgtagtatagtttcgttaagtcgcggttaagcgcggggttggaagttttaggttattggggtcgtacgggtggagataggaggagaaaggggataggcggcgagtcgtatatatttgtagaagttgaggttttgtttgtttttgcgcggtcgcgtagagggttcgaattttcgttcgggtagcgtcgggttcggttggattgggagcggtcgggagagggcgagagggtagtaagaaatggttagagttgttttttatttagtgtcgagaggttcgcgagggtaggcgggtagatcgtggttgtttttttttgtttttttcggagatagatattcggatttgttagggatatttagtgttgtcgttcgttttttatatatcgaattatttgttttcgtagggtaatttaggttatttattatttattttttttagagttaaggtgcggtacgaggaagtgggttttttaattttcggtggggtttggagttcggtagcggggcgttttgaagggttttggtttttcggtaggatcgtgtttttgagtcgtttttcgtttttcgtttttttttgtttatttgggtcgcggcgcgggtataggagcgtatttggaaggatttcgcgaatttagagaaaaatagagacgtggatgttgttttaaaatgagagattagagaaagtcgaggatatgtatttataaatatttttaagcgtcggtggttacggtaatttgttgcggggcggttgggagatttttaaaggtatcgcggaagtattttcgatttttaggttatttttttcggttttttggtttcgtcgtgcgcgtaaattttcgattttttcgagtcgtagaagtttttattgtaaagttgttgattcgcgtttttaaatcgggtatatgtttttttttttatagttttttaaatcgagtttcgagtttcgaagattttttagtattttttttttaattattttcggtcgcgtttgtttcgcgtagttcggttttggtttcggatcggttttttgatcggttcggacgttcgtttatttttttttttttttgttagttgttattgtcgttgtggttttttgagacgtttagacgtcgagtatttgggttttttggcgggtggggggttgtggttttcgttcgtttttcgcggttcgggcgggtggtgaaggttcgaggtgcgcgtaggtttcgagcgtttcgcgtagttaggtggaaggtggcgcgcggcgggttaggtgcgggggcgggggtggagaaaggtgattgggaggaatttgcgcgcggaggcggggttcggggaaggagtgggtggaggttgttagattcgaaaagaggacggagagaagggaatttaagtttttttttttttggaaaaggagttatttttttgagtttttaaagaaaaaaaaaagtggttcgaatgttgggagtcggaaggagtcggaggtcgggttgagttgattatatagttttaggatattgtcgaggattgtacggtcgttttaggagcgttggggcggaagcgtagcgggtatcggattcgtgtggcggttcgttcgcgagtgtaaagttttcgcggtcggtagtttattttaaaaatttcgtcggtcggtttggggcgggtacggggcgggcgcggagggcggggggcgggtatcggcgcgggtgtgtgggcgggtacgcgtcggtaggtttcgttcgcgtcgagtttcgggcggtttattgcgtttcggttaatggggacgcgcggtcgtagtttttgttttgattttggttcgttttttgttttcgcgttgcgtttcgttttttgttttcgtatttcgaggatttgtttatgaggtcgtttgggcggcgggtagcggggtgggatttcgcgtcggggagaggtagtttgcgtagggtcgaggggcggtcgggagtcgggtttcgggattgttgcgggggacggtagttgcgttatagcgtcggtgttttcgtatcggcgtcgtgtttttggaacgagggtaggatcgcgggtagcgtcgggttagcgcggagtttttttacgttgttgcgtttttgcgtttttggttttcgggttaggtggggataatttttcggtttttagcggttgcgtttcgggcgtgggcgatgcgtttttttcggtgggacgtagttgatttgatcgtttgggagaagtagtgtaaggaaattgatttagggttgcgtttattttttttttttttttttagtagggtggttgtttatcggtttgtgttaggcggtttggttttggcggggatgcggtagaggaggttttttgagtcgttcgaggtcggggcgagtttagaattggagaagttagtttggttttttagtgtgattttggagtgataagagttggttatgtgtttttaagttattgtattttaggtttgttttttttgtcgttagggtcgatggaagttttgggaaatttaaaggttataggtgttggaaatttgtagatttaagggtttatataggtaacggttagcgtttagggattttttagcggcgtttttgacgttgttttttattttcgggtttagtgtttttttgtttcgcgttgagttgttttttattcgttatcggcgatggggaagggatatttggggagaggataggggacgtttttagtttttgaaggttgtggaaggatttatgagttttataggtgtaatttgaagttggaaagcgagggttaaagaattggtttatatttttttttttagttttttgttatattttatattagaacgatttatagaagcgatttgaagagaagggtaggttttagcgttataataaaaatgaatacgtgtttttttcgtgtatatagaaagggttgggggagatattttttaggagtttggagaaggcgaagtggggagagggtaaaaattgacgaagaattgggaaatattttttttttttttttgagattgagttttattttgtcgtttaggttggagtgttgtggttttatttcgatttattgtaattttcgtttttcgcgatttttgtggtttagttttcggagtaattggaattaaaggcgtttattattatttttagttaatttttgtatttttagtagagacgggagttttattatgttggttaggttggttttaaatttttgattttaagtgatttgtttaatttggttttttaaagtattgggattataggcgtgagttattgtgttcggtcgggaagtagacgtattttgttatttttttagatttcggggtacggagtatttatataggttgatagttaacgaatttaaagattgtaaatttttttttagcgaattattttatggggttggtgggttttaggaacggggtgatttggtattgggtttttttagttagttatttttagtggatatatttatgtattttaatgagtttaaattggtagatagtttttttttaattataggtttattttttttatttgggattagagtgcgggaaaagggtattttggtggtttttaggtgtttatagtagtttattataatagtttttgagttttggattgtgtttgatagatcgaggtaatatttttaatttatagagaatatagttttttagattttgtttttaaagaggaaaggtaaggaggggttatttaagattatattaatttaagaagatatggatatatgggaggaatagtatagattggggcgtgttagagggtgaggggtgggaggagggagagtattaggaataatagttaacggatgttgggtttaatatttaggtgatgggatgatttgtgtagtggattattatggtatatatttatttatgtaataaatttgtatattttgtatatgtatttttgagtttaaatgttagaaattttattaattatgttatatagttttttttttttggttagattgtattttataagtgaaggatttttaggttaatataaatagttggtattgagtttgggattttttttttttttttagataattttattttgttgcgtaggttggagcggagtggtacgattttggcgtattgtaatttttacgtttcgggtttaagttatttttttgttttagttttttaagtagttaggattatagatgtgtattattatgttcggttaatttttgtatttttagtagagatggagttttgttatgttggttaggttggtttggaatttttggttttatgtgatttatttatttgggttttttagagtgttgggattatacgtataagttatcgtattttgttaagttcggga

SEQ ID NO: 145 - DNA, 22169 bp, Artificial Sequence
  chemically treated genomic DNA (Homo sapiens)
ggacgcgttagtttttttttttggatttgatgaggtacgaacgtatttttaataaagttaggttttttcgtcgtggttttttgggcgggtgtttgtggttcgggttatgagttacgttgggtaattttattacggggaagagggtaggaagttgggagttatcgtttttgtgttcggttgttatttcggtacgagggcgatcgtcggtttcgttttgtttttatggttgagggtttttgggatgtggcgggagacgggggagtttattttttaaattcggtgtattttgtagggtcgttgtatttataaaaaggttgattttatataggatttgtttttttgggttttggtttaggttggggcgagattggttttttgtgttatttgtggaagagtttgtttagtaaattgatagtgttaatagaatgttaagggggtatttatttagttttaaataattaatttaagttttttagagatgtataatggatttcgaggttaggggattgcgtagatagggtcgatatttgatgataaatttttatttgttaattagagtaaggtcggggcgtgttattaattttagtgttaggcggagtagaaggaataatacgattattttttggggaaaaattttaattagtaattaaggagttggtaggttttttattgggcgagaatagcgtttatttggtgtttattagattgaatagtttcgtgtaagtgaggtcgggtgagtgttttgtggttattggtttttattgtggcggtaggcgttgtgggggttgggttcgggtagtatttgggtttggtttgattcggagacgtttttggtagtggttatttatagattgtgattgcgaggatttcgatggggtcgttgtgtgtgtttgggaattgtaggtgtggatgttagaggtaaagttttttttgtgtacgtttagtatattagagttttttagtttttttttatagagtttttagtttttttttatagagtttttagtttttttttatagagttttttagtttttttttatagagttttcgagtttttttttatagagtttttagtttttttttatagagttttttagtttttttttatagagtttttaagttcgtttttatagagtttttagtttttttttatagagttttcgagttcgtttttataggttttattggatattaggttttagatttttttttaggaaattgtaggaattatagtagggtagttttatagatttgagggaatcgttgttttattttcgttttatagagttttggtgtttgggttgtagttgaggttgaggggttgaggattcggaggatgggatttttcgtttagcgggtgtagttaggtgggaggggttaggtttttagggtttataaggttttttggggatttattcgaagttatcgttttgtattaggtagggcgtgcggagagggttttgtttaatcgtgcgggtttaatttggagtgtagacggtaggacgtttttagttttgggtttttgagtttgtgagtggggggtttagaggtgaggtttttatagaagttttttttttaggggtaatgggtgtagggtaggcggggagtatttaggattttttttaggggtaatgggtgtagggtgggagtgggtggaggggggagtatttaggatttttttcggggtaatgggtgtatggtgggtggaggggggagtatttaggattttttttaggggtaatgggtgtagggtgggtggagaggggagtatttaggattttttttggggtaatgggtgtagggtgggtcggggggagtatttaggattttttttaggggtaatgggtgtagggtgggagtgggtggaggggggagtatttaggatttttttcggggtaatgagtgtagggtgggtggagaggggagtatttaggattttttttaggggtaatgggtgtagggtgggtggaggggggattatttaggattttttttaggggtaatgggtgtagggtgggagtgggtggaggggggagtatttaggatttttttcggggtaatgagtgtagggtgggtggagaggggagtatttaggattttttttggggtaatgggtgtatggtgggtgggggggagtatttaggattttttttaggagtaacgggtatagggtaggggggcgtattgaggatattgttggggagtttttttttttagaattttataggtttcggagatatattgaaagtaattttaaaatgttaggatcgtttataatcgttttgtattatttttggggtaattaggtatttcgatgttaatacgtacgtattttttcgatagggagaagttttttagttgtttgtagatagggtttcgttgttaagggttattggttggtttggtgttttgtaggggatatggcgttttttcgttttaagggtaatttggagaggatattatttgtgttttagagtgaggggttaggtttttagtttttttttgttatacgggtttggatttaggttagggtatagttagttattttaagttgattttgagggtttagggggagaagtagtttggagttaattatatagagttttgtttagggaagggaaggtttcggagtaggtagattgggcgggtgggggttgagatgtttgttcgttttatggatgtgtttaaagttttattgtttttcgttgttttagttatcgtcgtttttttggtttggagttttttgtcgttgattttgttttagttagcgtggaagttgtttcgtggtgggttttatttgaaagttatagtaggtgtatttagatggggttttatagtattgattttgtatataggaggttatgaaggttgtagtgattatttttagtttgtggttaagttcgtttattttgtggtttggtttttaaggggtatgttttttttttgtttaggggggtttgtatttgtcgtgtttatttatattttagggtttagtatgtagtagatgtttaataaagattttttattttgtatttttatagtattaggcgtgtggacgtttagtgatcgcggttttattgtgtgttttttgggggttaagggatgttgaatagtttggcggttggtatgagtgaggtttagggataggttgtgagtttgtttcggagttttgagtaggataggggtcgcgggtacgttagtttattttataggtttatttgggaatatgttaggattttttttagggggttttgtggttgtcgggtggttgtatcggtttagagtgagcgttattttttttaggaagttatttcggacgtttttttaatatttgttttttttggattgtttgggagttgggatgttggggtttatttttggttagtttttgatgtttttggaggttaaaatgtagtttttagaagaatgtagttttagtttacgcgtgatatggatgaattttaaatatattacgtttagtgaaagaagttaggggtaaaagattatttatggtataattttatttataggtaacgtttagaagaggcgaatttagaggtagaaagcgggttagtggttgttaggggttggggtagttagggtagagtgatagtatttgggtatagtttttgttttgtgtagtgagaaagtttcggaattagatagtggttgaatgaatttgtgaatggattagatgttaagtaatagtatgttttagtttaaaagttatatttttagtttggataatatagtaagatttcgtttttgtaaaaaaatttaaaattagttaggtatggtggtgtatatttgtggttttagttattttggaggcggaggtaggaggatcgtttgagtttaggagtttgaggttgtagttagtcgtgattttattattttattttagtttgtgtgatagggtgagattttattttaaaaaataaaaaagtggttatgtatagtggtttacgtttgtaattttagtattttgagaggttaaggtaggtggattatttgaggttaggagtttgagattagtttgattaatatggtgaaattttgtttttattaagaatataaaaattagttgggagtggtggtatgtgtttgtagttttagttatttaggagtatcgcgtgaatttgggaggtagaggttatagtgagttaagattgcgttattttaatttagtttgggtgataaagtaagattttattttaaaaaataaataaaaaaaggtaaattttgtaatatgaataagttattatttagaatttttttatatatatatttatttttaaattagtttttagttttttttgtttttagggagtagggtggggtggggtagggttataaggagaatttaattaggtaattttggaaaagggtttttttttatttttttatttttgtagttattgttttttttttagttggggcgattatcgagtttagcgtaggtttcgtcgtagggtttatagttattattacgtttttagttcgttttagggtttcgttggttgtagttggaaggggaattatatatagatggggaaattgaggtttagggaggggatagtgtggggagtatagtaaattagagttagttttgttttatagtttttcggagtttcgggttttataggagaaagcgttagcgttgtttgggaaattcgaggtcgttaaacgtagttcggtttataggtgtgatgttttaaagttagtcgttcgttaaagttgttggtattttttttttagttcggggaaagattcggaaagttttggatatgtttgtatatgaaggtgaaagttgacgttagtttgttttagatttttacgttttcgtagttatagtttttttatttgtgcgttggggatgaaaattgtattggtatatttggagggtgggcggtcgtttgttagggtttttacgaggttgggtaatagcggcgttttgagtgtggagttgttatcgttgtattattgaggaaggtaagttagacgtttaatcgattttgtaaagttatatttttttattatttatagacgagatatgaaataggaaaggttttttttttatagtaaaagggtgtagtttttcggttcggtttggaattgtttagtgggtatcggtggtcgttgttgtttattataggtgtagggaatgaggaatgaagttagtttcggtttttgtggggtttttagtttgtcgttcgtatttgggggttttcgtatttagttttgttttgtggaagtattttttttggtgtattgtttgttttgttttattttttttttgttagggttgttgttttttttttttttttttttttttttattattattttttttaatggaaaatatgttggttgttgtttagaggtagggtttgttttaaggagttagttttttttagagtattttaggtttttattttagttttcgttttaggtttttttgtttttgatgtttttttagtttgagtaggtgagattttttatttgatattgtgtggggttttttttgttgttttttgtttttttgagatagagttttattttgttatttaggttggagtgtagtggtacgattttagtttattgtagttttcgttttttgggtttaaaggatttttttgttttagttttttaagtagttgggattataggtatacgttattgcgtttgggtaatttttgtatttttagtagagacgggggtttcgttatgttggttaggttggttttgaatttttgattttaggtgatttgtttatttcggatgttgtatgtttttaaatatgtttttttaattttggcgtttttgaagattaggttttgtataaataggaggttttgttataggttttttcgtttagtttagtatgaggaggagaattaatttgttttttttttggttacgtttaagacgaggtaggtgatttaatggaaagagttagatcgggtgataggagttatttcgtttttttttagttttttaggtcggttgtagggttaagttatttttcgtttgagttttttttttttttttttaaggggaagttacgtttttagttcgtttgtagtcgggaaatgacggggtagtttaggttggttggggttgtgtttagggatattcgtttgggagaaggagaggggtagggttagtaggaattttgttattgttgtgtgattttggggttgatggcgatttttttgggttttttttttttatttatcggtgtttgatttagatagttttacggggttgtcgggagttatgttaggttattatcgggtcggtatatttttaatatgttttatatgtgagttaggtgttttttttacgttttgttgggaagtgaattttataggagtaggggttatgtttgttttgtttttatcgggggtttggtttggagtagaacgtagtatatagtaggcgtttaaacgtgtttgtgaattggagttattttgggagatggattttttcggagttggagttattttgggagatggatttttttagagtcggtaagtttttttttaggtagtgttaggtttagtttattaggtagtatttttaggattttttgaatttattcgttaattaattaaatatttaggaaggaggttttggaaattagtattgttagttaacggggagaaggcggggaagaaaggagcgttgattaggtgttttttttatacggtttttatgtaatttttatatattattaagagatttagcgtgtattagttcggttgatatgttggggaaattgaggtttgtatgatttgatgatttaaggttatagagttagtggttaggttaggttttagatacgaggttgtttaaagttaaagcgtattatttagtaggtagttggatatttttttggaggtgttgggtgtgatagtttatttttattttttttagtttttggaagacgtttcgtgttattttgattttgtcgttagtagttaatattttagttgttttttgttttaacgtttagtttagacgtaggtagttttgggagagcgttttagattaaggacgtagttttatttagatagatagggtttttgtagttttttttagttttttttaaaataaagagaaaaaaggtggagttttttttagtattttttgtttatattgacggagttgatgagggggttagagaagagttaagggttatagtgattttttgggtttgtttagaaggttattattttcgattatagttattacggttatatttcgtatagtagttgtttagagattaattatttttcgtttattagtatgtgttgttaggtgttttttatttggttattggttgattaggttacggcgatattttgattttttgggaaggtattttgtattaataaaattattttttttaatttcgggttttgtaattatttgattggtagttttcggtgaaggttttttttttttgggatggaaagaaatgatttatttagtattagtgagttaggtattgtgacgtttattatgattatgttttttttatagcggaggtagtaaatggtattaaaagttaaagtttttttcggggttatagttggatattacggggttaggatttttatttaggttggtagggttttaagagtttgtattttagattttttcgagaaatagtgtgggtttttttttttgttgggggagttaggttttttgtaggtgttttggttaatttttggatagattttttgggttttttgagaaggatgggtaggaacgggaaggtagaggtatttgaggggtgtatgttgggtggggtttaagtttagggagggagttcggggtttttttcgaagcggttgtaatgttttttagattgttgtgtgagttttgatttgtgtttttataagtcgggttcggttgtggttttggtttttaattttgcggtttagaagtaggagtttgaggacgcgttttcgttttattttttcgttggatttgtggggtgtgtataatggggtttttgtgggttgagttcggttgtttgttaggttaaattgaagtaggtttttcgttaagaaggagggggcgttaggttttagtaaaggggataaggttaggtattaaagttatggtcggcggtttgttttgggttggaaatagtttatcgggattttaggtttggggaatgggaaagtgggtttatgatattagtgttttgcggttttgtggtagggttttaatttagatattagggagttgtagtaatttgtattttaaagtatagcgttttggtttagggagattttagttttagatttttgtgggttaggttgtgtttattttttggtgttattgagaagaagtaataggtttttaatttttttagtacggtgttttttttatttttttaaagttttttgtaggagtaagaagttttttttagagtttcgaatgggtgagaggtaaagttcgagtcgggagcgtagtggcggggaagggggttatatattttgggaagttacgtataattaattatacggtattaattcgttttttttaataatagttgttgtattttttttggattttagttgtcggtttttgaatgaaaggaaataagatttagggtattaagcgttcgtgcggtttttgtagagggagaagggggttttaaaaagtaaaaaaaaaaaaaaaaaaaaaagtagtgcgtatttattagtgtttgataaagatataatcggttttgtttattaaattgtttatagatttgtttaattggttttagtttggggagggtgggggtcggggagggagggggtttgttgtttataggttgggtagtcggtataggtaggagtcgggttggggttgttaagggaatgggattttttgtagttggaatgagggcgcgtagattggttggggagttatttttttatttgtagtttttggggggcggagggaattttttttttagatattaaatatttttttattatttttattagggatggatttaagttgaagggtatcggttatagtagaatagttttttacggttgatgggtatttataggtaggtaggagggagcggtttcgtacgatttttcggtttttttagtgtttattttatatttgaggttggtagattagaagggttacgggattttgaggttagagtttgtagatgttaggatagaaattagatttaataattattttatattttacgttaaaatatgagttttatttttttttttttagttttagtttgaggtcgggaagagggagttggggtaaatagagagtttaaaggcgggttcgattttgaagagttaattttttttgaagaggtattatttattcggaggtggtattatttgtttaggaagtattatttgtgtttagaggaggtattattcgtttagaggaggtattattatttagaggaggtattatttatttagaggaggtattattatttagaggaggtattatttatttaggaggtggtattattcgtgtttagaggaggtattacgtatttagaggaggtattattcgtttaggaggtggtattatttgtgtttagaggaggtattgtcgttagtttaggaggtattacgtatttagaggaggtattattcgtttaggaggtggtattatttgtgttagaggaggtattattattagtttaagaggtattattatttatttaggaggtattattttcgagaggaggtattatttgtgtttaggaggtattattcgtttagaggaggcgttttaagttggtagggtggtgggggttgggttttttagtaaatggtttagagttttttttggtagattaattgttttttggggatttaaagaagaattggggtattgggatttttatttagtgatttcggagtttgaggtggtttacggaggagtgtttaagtttttagtagttagattagttttatacgtagtataattgttggtgattaagtaattgttagattttgtttaataaaagttagtacgtgatcgtgtttagattttgggttatttttagaagataatggtttagtgttttgttttttgcgcggttgtagaaggtaggggttttgttttcgataaagtaataggtttcgtaggggtggtatttatacgtaggttttcgtgttattggtcgttttatatttttcgttatttaggtaggttttatcgggttgggagtatcgcgggtttaggtaggggtaggagaagagaggttagttttattcgtattattattatcgaaggttttggttattttgggggcggggatttgtatttagttaaggggtatcgttcgttttttatttcggacgtattttgtttagtattatgggttgttggggtacgggttcgtaggaagtttttttatgaaattaaaggggcgttaatattttgtttagagttttgtagttagaaatggggggaaggggagtagtagggaatacgttttgtttgaagtagggtggggtggtttgatgtgtcgtttggacgtagtgggggaaaagtagagataaagtgggttattttttaaagcgttgttttttattttggaggtttattgaggagtttggtagggtagggttttttatttagtcgtcgagattgtttttgtttaaattcgttttgtaagggggtagagttggacggggggagggggggtggttatatttagttttcgttcgtgggaaaatgcgatagttgttcgttcgttatttcgttcgttaataaagcgtcggttttcgttttagaattagagcggtttattgtggagtcggggtcgtttttaggggtatcgggatagtattttggggacgcggtttcgttttcgtcgatatttaatatttgttttcgcgggcgcgtatttttagggtagtttttatatatttataggagggggatgaaggttttttattcggaaggaattcgattttatttcgagaagggattaattatttaagtttttttttttttattttatcggggttgagaaacgggggaggggggtgtgatatagagtcgtattttttggaagaggatagataattttcgtttttaattttcggagaaagagtggattaattattcgattttttagagatttcgttcgttgtgcggcggggagaaatgtaagagttttttattcgcgtttcgtttttcgtttttaagttttttaaattttaatttcgtaaagtaaaaggaaagtttagttttttcgggcgcggcggttttttacgtaattttttttttaaattgagagtcgggttggggggtatcggcgggcggggcgatcgggagttcggggatttagttcggtcgcgcgggttagtgaaggcgaacgcggcgtcgtagagtttatatttcgcgttttaatattcgtttcggcgtgggttagaggcgaagaagaaagaagataaatggttcggagaagtaataggaaattaaaatcgattttatttaaatcgaaaaatagtaggtagttcgttcgttcggtcgatcggcggtaagttttacgcgcggcgggtgaagggcgggttcggagtagggttttcggggttttagtattttatatcggttttttaattcggttttaggtacgggcggcgcgagttcgtttttacggggggatcgagggggaaggtcggttttttttgatttcgggattttagaattttacgtttcgggtcgttcgtttttttttttttatgttggttttttcgtcgttcgtttttagtcgtggggcgcgcgcgtcgggcgtcgttaaagtttttaaagggcgcggaaagtgggggttcgcgggtgggtgggcgtttatttcgtgcggcgagcgcgggtagtagcgttaggtagagtaggggcgttaggagcggcggtatgtttttttatcggttgttttttgcgttcgggcggcggttttttgcgttggtcggcggggttgggacgtatacgcgcggcgtacggtttcggggcggcggcggacggtttcgttttttttttttcggttggttggcggcgttgtgttttcgtaggttttcgggttcggtttcgcgttcggttcgttttttcgttgcgttcgcgttcgcgttcgcgtttcgcgtttcgcgtttttgcgttttttttcgcggtcgaggtattagtgaggtttagagtcgaggtgcgtttcgttttcgtcggtttcgtttcgttcggttttattttcgtcggttttttcgtttttttcgcggttattttttttcgtacgtttcgttcgtttttgcgttttttcgagttgagtcgcgcgtttcgagtttagttttttcggggaggagggattcggcggcgcggcgtgggtcgggagcgggcgtttgggattatttttcgtttgaaagtttttagaggttaaaagtttgagtcggggttgcggaaggattcggttttggcggttgtcgcgttcggcgataattggcgattgaaatttgtatgtgaataagcggaggagttcggggcggaatggggagggcgaggtcgcggatagtcgtgtgtatcgtgcgttgggtcgggcggggagtagttgaggttacgttgggggatttcgggttcggggtagggttttgggagagtggtttagtcgtgtgtgcgtttttagtttagcggttttattttttttcgagggtttcgtggtcgcggttttaggcgtttagaggatcgatcgtcgttagatatttttggtcgtgattgttcgagtatttgatcgcgagggatgggggcgtcgcggtttttgggtaggggatttcgggcgtttcgagggagtagtcgggattagtgtttcgcggacggattgtgtttcgtttttttaagggggattcgcgtcgatacgtttttcggttatcgttttttttttgttcgggcgtcgtttgtttaaggtggttttagaaagtataaacgggtcgggcggatttgtcgttggcgtcggcgtagttttttttacgtgtttttttcggttgatttatttttttattacgatgttaggtacgggtattttgtgttaagtttggttaagcgttaggagtttaaaatgtttgttatagtttttgcgtaaagtttacggtttcgtgttagggatagatagcgttttttttttattttaatatagggtggtgagtgcgatggtagaaggcgcgtgtttcggcgttttttttggagtaggagggttaagtttgttttgcggggagatcgaaaggttgggagggatttaggattgtgggggtttggggggagggttgtagaaattttagagtatggtggtagaggtaggtatagaaagtaggataaattttatatttgattttagtaagttttttttggtatattttttgttaaatgttgagtattttggaaatagttagtgtaggcggtttgtttcgtttttgtagttgttgttgggagtttttttcgtttgcgtttttttagaatttggttttatttttgtaggtttggggtaatattttggggttagcgttttaggagaggaggcgtttggaggtagtagagatgtttatgtaatagtagttaggtagtttggaggagtagattttttatagaaggaagcgcggggttgtgtagtttttaggttgaggattttgtttattacgacgttttttgtttttggtgggtgggggtggggtggggtatagggaggttcgaaggttttaggtttggtgttgatcgggtgcgggtgcgattgtttgtgtgtttttattggtatttttgtttgtgggttttaggttagaagtaatggtttatgtagtttaggttcgggggttagtttttagtattttgcggaggggcggtttgggaggggaggaggggatttttggatagggggttttttttggtttgttttagttgtgtcgatagtatttttattttgggtttttattttttattagtagagaagagagtggtttattcggtgtttattcgttaggttatttagtagttaggtacgtttataagttcgcgttacggatggtgcggtcgggtgtataggttcgagggaagtataggtttcggttttttagtttttaatttttgtattatttatagtcgggagtattttatggatagttgtggtcgaggagaagttagggatgagggggatgggttttatttttttattagtttgggaagggggtaggtttttggtaagtaggtgagaagtttttttatttataagttgttcgggttttttatttttttttgttaggttagcgggtgtgggtagtcgggggaggttggggttttgatataataggagtatatttgttggtttagggtttggagatttttttttataggtcgggaggtagttttgggtagcgggtattgcggggattaaagagaaataagagtaggttgtgtgtagggtattttagttattttagaaatttaatgggagggtgggggttaggattttaagaagttgaattggggtgtagtgtcgttaggttttttttgtaggagttattttgggttttttgttttaatttgtggtgggagttggggtaaggttttaggggtatttcgaatgaatggggttgtttttaagttggttagggagtttggaagtagatgagatggggtcgtagagtttggtttgcggaggggagaggtagacgtgttttgtagtttttttttttttagaggttttttgcgggtgttgaggggagagtggtttaggcgttgtattttaggagattgaattgggttagtttttttttgtttgttgttagagaaatgggggtattattgttagggtgagttaaggaggttttgttgatattggtttaattaggttttttttttgcggttgttgtggggattttcgagagtagagtatatttttaagtgcgtggagaggtaagtatagttggtgagtatacggggatagcgacggagtttatggagatttaggtgattttaaaatattttagggtcggtttcggttttagagagatgtggttcgagtagaggggggttagtagtgatttggtgggtgggtgtatttgaggggtgtttgtgttgaaagttttgtagtagattttaaggagtagttagggttgagattttcggtgttgagtttaaggttttttttttttttgtaggagtttattttggtttttgtagtttttatgattttgtggcgttggggggcggttagtatgatgttttttattttttaggagggaagttgaggtttagagatattatgaggatgttagtttaaggtttagttaggttttggtttttagttgttgttatttagtagggtaagtgggatttttaggaggtgttgggggatatttttttttttttttatatttatagtttgtttatcgtttaaggtagtaggttggattcggtgtagggattatggtttggcgtggttaggttggagtggtttttgggattgaaagtagggggcgtgggggttttgaggcggggtcgagtgcggggacgttttgtggcgggtattttgttgggttttgggtgggggttattattaggtagttgtgggaatattttagattatttaggagtagggtttttttatcgtttgaagttgattgtaaaaaatatttgatttgtgtgtaaagtttaagtttagaggtttttagggtgtttagtttttagggtgttttttacgtagtttttacgtttttatttattgtagtttttgattatcgggtatatcgtggggttttcgttggtcgtcgggttttaggttttgttgtattaagtgatttttaaagttttatttgtttttttttatttataaagaatttgggatattttttcgaggttgggtatttttttagatgtggttttagtgtttcgtttgttatttggttttttgtgttgggcggttcgttgtgacgtatttggtagtttttgttttaggatggattcgggtcggtttttgttttgagaatagagaacggtttttgttttgaggaggttggggtttggaatttgttttttggttttttgttgtgtgtagatagttatcgttatttaggtttaggggtgtttgtaggtgttgggtattttattttggtttttataggggttttttatgttttgtatttttcggtttgtgtcggggatttttttgttttgttgttgtaggtttcgttttttgtcgagggggttttttttttacgtgtttttgagattttttagttattttagaggttttcggtcgtttgagtatttttgattatgaagtttttttggtttattttttgtgtgtgaggtagagtttatttttattatttcgatttatattagaggtttcggaaggtttgttgattgatttgtgattgtaagaagttgaaggaatgtgggcgtagattcggtaggggttttttttggtgtaaagttaattggttgtttatgtaagtttgttgttgtggttagttttttcgttaggcgtttggtattttttttggatttagttgttaggatagtgatttttagttgtggttaggattttgttcggggttttgtttatttagtgtttttagtggtttttatgtagaaattgttttttttgttgtttatgaggtatgggatagggttagtattcgagaggtaggttttgttgtttttttttgtatagaggttgggggagtgagttgttcgggtaagttttcgggtaggtattgggttttttgagtaggtgagttgagaaggttttagttggtgtaggtttcgagagttgtaggattggttatggggtagatttggtattgttattttagagttgggtttggggggtggttggtgtagtgtagattttaggtggaggttatttgttcgttttttttacgtggtttagggtttagatttatttgtttgtttttggaagtttttagattgtttagagtatagattttagtgggaaagatagtagataggtttgggtatggttttttagttttgagaagtggggagtttatttagatttttttaggattttaggtttttttagtagtttatagagcgtgggtggagtttgggttggggttgggttatttgggagttaaaggtttatttttgttgtttttagggagttttagggagacggtagaggtagtgtttggttggggttttggttggcgtgtcgtttgaggggtgtatgtattgggaagttggttaggtttgtttaaattagggggtttttaggaggagagatattaggaggatgggtatagaggcggtttagtattagggttggtatttttaggtaggggttgtggggggttggattagatagggaggttgttacgatgtttggttgttggatgggggtatagaggttttgagtggggtggtagagtttggttattaggtttatttgtattttttatgtttttttattatttttagatttttatgattttaaattatttagttttagggatttttgtagagtttgtggtgggggtgattttttattttgtttggtttttgtttattttattttagaattttttttaaaaagtaagagtttcgggggacgaaatttcgaggttttattttttgggttttggtataaatttcgagtttttttcgagggttgagttattgggaaagtcgggatgggttggttttttttttttttttttttttttttttttttttttttttttcggtttttttttttttttttttgttttattttttttttttgttttttttttttttttttttttttcgttttttttattttttttttttttttcgtttttgtttttttttttttttgagggtaaaaatagttggaaaatttttttaaaaaagtttattttaattttagagggataatgttggtgttttaaagtatagttttttgtttcggaggagttatcggtagagttaggagtttttgaaggattttgattatattttttattttatttcgatttgtgtttggtgttttaagtggagtttgggttatttttgattttatcgttggggtgatggagaagtagtcgttcgaggcgagagttttttaggtggtcggggtttttttttatttgttttagatatatttaaataagttgagaattttcgtttttttatattttttttcgcggatttttacggattttttttgtaaatgaatatgggtttggaaatcggggtgtgggttatagagagtacggggaattttgttcgtgaagtaatacggagtacgaatataagtaggtatcgtatatttgcgagttattcgggttttcgggggaaggtaaaaagttttaataagttttaagtaagattaggacgtttttatagttttgttttgatagttaaggaaaaaatttgttaaaaattagaggcgttgttgagtgttggcgtgggaatgttagtttagttagagttttgttttgggttatttaaataaaaatagatatgttggtggtaaatgttagttgaatacgtaggagagcggtgtttttcgggttcggagaagggtttgtagttgtatttttttttttttttttttttggtttttttagtttttttattattacgattagtattttattggtaaatatttggtgtaataatttttaaaaattagtaagaaaagtttgagcgttttatgtggttgtgattgcgtggttttagttggaagtatggatttttagcgttttttagagtttgttttcgagggatattttaattatttgagggtttttgtacgatataaattagatcgattatttttagagtggagagggggataaatttatttgtagtaagtgaaggttagaggttgttttgggatggtattgtttgtttttaggggtttgtggtggtgtagtagatatggggatttttgggtttttttttttttttgttggggatgttatatagatttacgtttagggatttgaatttagagtttgttttaggggtggcgaatgtatttgggatattgaggatttttttatcgggtgtattttatggttttttggtttttttttttgagacggagttttattttgttgtttaggttggagtgttatggggcgattttcgtttattattattttcgtttttcgggtttaagtaatttttttgttttagttttcgagtagttgggattataggtatgtgttattacgttagttaatttttttatttttaatagagatagggttttattatgttggttaggttggttttgaatttttaatttcgggtgatttgtttgttttggtttttcgaagtgttgggattataggcgtgagttattgtatttggttagttttttggttttgaagggtttttgggagggttttagagaatgttttggtttttttatttttgggtttttatcgattgaggttagggttgggaaggggtgatgagtttaggatttttttggcgagagcgagggtttatgttggggggtttttttttgttatttttttttggtgatatggggttggttggagagttttttcgtgtttgggagttttttagtgtagggggggaagggggttattgtaatgaatttgatattagtttttttttttttcgttttgttggtagtttttatttatatggggggcgggtttgtttttttttttttaaagttgggggttttgagtgtggttggggtaacgtttggttttttttagaatagtggggtttggaatttatttaagggaagaagagtgaaggaacgtagatgtcgattgtatggagttttttcgggttgtagtttttagagtttgggcgttttgtgagttagaaagagaacggttggggagagggttgtgtgaggttttgtttttttaagatcgttgcggaggatcgacggggtttagggattttgattgaggtgtgtcgagtatagtagttttggataggtcgtatcggtttttttgtttgttatttgtttatttgttggtgggtaggaatagatttgatgttgtaagaagaggtttttaggattttgttttttttattggttgagtttggattgtggagttagtcgtttttatattgggtatagatgatcgatttaggttttgagaagatttaaatagtagtaggacgtgtatttggtaggggtaggagggttttttttggatttaaaagtgtattcgcggagttttttttttgtagcgtaggttttggggggatagtggttaggacggaggttttcgtggaaagggggagatgtgaatagtgagttttttgtatgtaggtatttgggaaagaatattttagttaagtggttttgagtatatttcgattttggttattttggttttgtggattaattttggggtttaggattaatgatagttagtgttcgttggtgtttttagtttgggttaggtttgtgggttggtttttttaatgatggggtaagtttagtttcgtttatattttttttttttttttttgtgtttttttttatttttaggagtgggttttaggtttgttattcgttatttatggggggttgtgggttgattcgtatttttttaaaagattcgttgtatatttttagagtttgtgagtaggatttgttttggagatgggtttttgtagatgtcgtcgagttaagataaggttatgttggagtggggtttgttttaatttaacgattggggtttttggtaggagagggaggtttggggagaaggcgttgggaagataggtagaggttggagatagtgtagttttaagttgggagtataggggttgtcggtatttaatagaagttggaggaggtgggaaggattttttttagagttttgggagggggttcggttttgtgatatttagattttggatttttggttttcggaattgagagagtatatatttttgcggtttgaagttattaaatttttggtaatttgttttggttaggaaattaatattagggataaaggtgttttaatgtagataaagatagtttttgaattaattaagttttgcgtaaggttgtcgggattgattgggggaagtgagggatttagtagttttttcgacgttcgttaggtatcggtttttatatacgtttgttggcggtggttacggtaggtcgttttttaggtgaaattatataatgagtagttttaagtttgtcgatttatatagtagaggttgtttggtttggcgttttttttggttggaggattttgttttttttttttgtttgtttgtggttatttcggttgtagaggagattggtagacgacgtttttatttttggtcggggtaaaagttttgtttaaatatgataacggtgaaattcggaatagcgatagagttaatttatgattgaggtagggttggaggttttttggaaaacgtacggagaaatacgagggtttagttgtgttttgggtcgttttatgagtttagtttttttcgttttagttttttttttaaagaaaggataaaattattgaaagggttcgtttgggttataaacgttttaaattggttttcgcgtggaaattaaataagggtaggttttagtttttgggatttaggtgaaattcgaggtttgtttgaggttatagcgttttttcgaggacgttagttttgttggttgtgtttggggttaggttgaggtatagcgggttaggaggtcgagttttttaaaggagttgtattgttttttttttagaatatgaaattaatgtttgttattttgaatttttatggataagattttttggaagttagtttgtgttagggttagcgttttttagggttgatatttatattttcgtatttttagcgtgattcgggatagtggtagaattcgttgggttttttttacgggagtgttttttttttttttttttttttttttttttttttttttttttgagtcggagttttatttttgttgtttaggttggagtataatggtgtgatttcggtttattgtaatttttattttttgggtttaagtagtttttttgttttagtttttcgagtagttgggattataggtgtatattattatgtttggttaatttttgtatttttagtagagatgaggttttacggtgttggttaagttggtttcgaattttt

SEQ ID NO: 146 - DNA, 22169 bp, Artificial Sequence
  chemically treated genomic DNA (Homo sapiens)
aggagttcgagattagtttggttaatatcgtgaaattttatttttattaaaaatataaaaattagttaggtatggtggtgtgtatttgtaattttagttattcgggaggttgagataggagaattgtttgaatttaggaggtggaggttgtagtgagtcgagattatattattgtattttagtttgggtaataagagtgaaatttcgatttaaaaaaaaaaaaaaaaaaaaaaaagaaaagaaaaaaaaaaagtattttcgtagagagaatttagcgggttttgttattgtttcgagttacgttgagaatgcgagggtgtaggtgttagttttgggggacgttggttttgatataggttggtttttaaggagttttgtttatgaggatttaaggtggtagatattgattttatattttaaggaaaagatagtgtagtttttttgggaagttcggttttttggttcgttatgttttagtttggttttagatatagttaatagggttgacgttttcgggaagacgttgtgattttagataggtttcgggttttatttgaattttaggggttgggatttatttttgtttagtttttacgcggaagttaatttgggacgtttgtgatttagacgaatttttttagtggttttgttttttttttggagaagggattaggacgaagaaggttggatttatggggcggtttagggtatagttgggttttcgtgttttttcgtgcgttttttagaaagtttttagttttgttttaattatgggttggttttgtcgttatttcgagttttatcgttgttatatttgagtagaatttttgtttcgattagggatgagaacgtcgtttgttagttttttttgtagtcggagtggttataggtaggtagagggggaaggtagagttttttagttaggaagagcgttaggttaggtagtttttgttgtgtaaatcgataggtttaaggttgtttattatgtggttttatttgaagagcgatttgtcgtagttatcgttagtaagcgtgtatggaggtcggtgtttggcgagcgtcggggaagttgttgagttttttattttttttagttaatttcggtagttttgcgtaaagtttggttaatttaaaaattgtttttgtttgtattaaaatatttttatttttggtattaattttttggttagaataaattattaaaaatttggtggttttaaatcgtagaaatgtgtgtttttttagtttcgaaggttagaaatttaaaatttgggtgttataggatcgggtttttttttaaggttttagggaggattttttttattttttttagtttttgttgggtgtcggtaatttttgtgtttttagtttggggttgtattgtttttagtttttgtttgtttttttagcgttttttttttaaattttttttttttgttaagggttttagtcgttggattagggtaggttttattttagtatggttttgttttaattcgacgatatttgtaaagatttatttttaaaataggttttgtttataagttttgggggtatatagcgagttttttgggggaatacgagttaatttatagttttttatgagtgacgagtgatagatttggagtttatttttgggggtggagggaagtatagaggaggaggagaagggtgtggacggggttgagtttgttttattattgaagggattagtttataggtttggtttaggttggaggtattagcgagtattggttgttattaattttgggttttagggttggtttatagggttagggtggttagggtcggggtgtgtttagagttatttggttggaatgtttttttttagatgtttgtatgtaggaggtttattgtttatatttttttttttttacgagggttttcgttttggttattgtttttttagagtttacgttgtagggaaggggtttcgcgaatatatttttgagtttaggggaggtttttttatttttattaggtgtacgttttgttgttgtttggatttttttaaaatttaagtcggttatttgtgtttagtgtgagggcggttggttttatagtttaggtttagttaatgggagaggtagggttttgggggtttttttttatagtattaggtttgtttttgtttattaataggtggatagatgatagatagagaggtcggtgcggtttgtttagagttgttgtgttcggtatattttagttagggtttttgggtttcgtcggtttttcgtagcggttttggaagaatagggttttatatagttttttttttagtcgttttttttttggtttatagagcgtttaggttttaggggttgtagttcgggggggttttatgtagtcggtatttgcgtttttttatttttttttttttgaatgaattttaagttttattgttttaaggaggattagacgttattttaattatatttaggatttttagttttggggaaaggaggatagattcgttttttatatgagtgagggttgttagtagggcggagagagagggggttggtgttagatttattgtagtggtttttttttttttttatattgaggaatttttaggtacggagggattttttagttagttttatgttattaaggagaggtggtagaagggagttttttaatatagattttcgttttcgttagaagagttttgggtttattatttttttttagttttgattttagtcgatgggaatttaagagtgaggaaattaagatattttttgaggtttttttagagattttttaagattaaaaggttggttaggtgtagtggtttacgtttgtaattttaatatttcgggaggttaaggtaggtagattattcgaggttaggagtttaagattagtttgattaatatggtgaaattttatttttattaaaaatagaaaaattagttggcgtggtggtatatatttgtaattttagttattcggaggttgagataggagaattgtttgaattcgggaggcggaggtggtagtgagcggagatcgttttatgatattttagtttgggtaataaagtgagatttcgttttaaaaaaaaagattaaaaggttatgagatgtattcggtaggggggtttttagtgttttagatatattcgttatttttggggtaggttttgaatttaggtttttgaacgtgggtttgtgtggtatttttagtaaggaggggaaggggtttaggggtttttatgtttgttgtattattataagtttttgggaataggtaatgttattttagggtagtttttggtttttatttgttataagtgagtttatttttttttttattttagagatagtcggtttgatttatgtcgtgtaaaggtttttaagtgattagagtatttttcggagataggttttgggaggcgttgggaatttatgtttttagttggggttacgtagttatagttatatgaaacgtttagattttttttgttgatttttgaaaattattgtattaaatgtttattagtgaaatgttgatcgtgatgataagaaggttggggaggttaagagaaaagggaagagagagtgtagttgtaaattttttttcgggttcgagaagtatcgtttttttgcgtgtttaattggtatttgttattaatatgtttgtttttatttaaatggtttagagtaaggttttgattaaattagtatttttacgttaatatttagtagcgtttttggtttttggtagattttttttttagttgttaaagtaaaattatagaagcgttttggttttatttaaggtttgttggggttttttgttttttttcggagattcgaatagttcgtagatgtgcggtatttgtttatgttcgtgtttcgtgttattttacgagtagaatttttcgtgttttttgtaatttatatttcgatttttaggtttatgtttatttgtagagggggttcgtgggggttcgcgggggggagtatggggggacggaagtttttagtttgtttaaatgtgtttggagtaaatggggggaaatttcggttatttgagaaattttcgtttcgggcggttgtttttttattattttagcggtgaggttaaggatggtttaggttttatttggggtattaggtataggtcggggtggggtggggggtgtggttaaagttttttaggggtttttggttttgtcggtggttttttcggggtaaaggattgtgttttgggatattaatattgtttttttaagattaaaataaatttttttaagggggttttttagttatttttatttttagaaaagaagaaaggtaaagacggaggaagggaagaagatgaaaggaacgaaagaagagagggagagagggaggtaagaaagagaagtaaagtaaagagaaaaagagggagatcgagaaagggggaaggaggaaggaaggagagggagggggaggggttagtttatttcggtttttttagtgatttagttttcggaggaggttcggggtttgtattagagtttaaggggtggagtttcgaagtttcgtttttcggggtttttattttttggagaaagttttgaggtgaggtgggtaggggttaggtagggtggaagattatttttattataggttttgtaggggtttttgggattgagtagtttgggattatgggggtttgggggtagtgagggggtatggggggtgtagatggatttggtggttaagttttgttattttatttagagtttttgtgtttttatttaatagttaggtatcgtgatagtttttttgtttggtttagttttttatagtttttatttggaggtgttagttttggtgttaagtcgtttttgtgtttatttttttgatgtttttttttttggaagttttttgatttgggtaggtttggttaattttttagtgtatgtattttttaaacggtacgttaattagggttttagttaggtattgtttttgtcgtttttttgggattttttggaagtagtagaaatgggtttttggtttttaagtgatttaattttagtttaggttttatttacgttttgtgggttgttgaggggatttggggttttggaaaggtttgagtgggttttttattttttagggttgggagattatatttaggtttatttattgttttttttattgaggtttgtgttttgagtagtttaggggtttttagggataggtaggtgggtttgagttttgagttacgtggaaaggacgggtaggtggtttttatttgagatttgtattgtattagttattttttaggtttagttttagaatgataatgttaggtttgttttatggttagttttgtagttttcgaggtttatattagttggggtttttttagtttatttgtttaggaggtttagtgtttgttcggggatttgttcgggtaatttatttttttagtttttgtgtagaggggaatagtagggtttgtttttcggatgttgattttattttatgttttatgggtagtaaggggggtagtttttgtatggggattattggagatattgagtagatagggtttcgggtagagttttggttatagttggggattattgttttggtaattgggtttagggagggtattaggcgtttggcgggagggttggttatagtagtaggtttgtatggatagttagttgattttgtattaagaaaagtttttgtcgggtttgcgtttatatttttttagttttttgtagttataggttagttagtaaatttttcggagtttttggtgtgggtcggaatggtagggatgggttttgttttatatatagagagtgggttaggaaggttttatggttaggggtgtttagacggtcgagagtttttgggatggttgaggagttttagggatacgtgggaaagagattttttcggtaaaggacgaggtttgtaatagtagagtagggaagttttcggtatagatcgaggggtgtagggtatggggagtttttgtgggggttagggtgagatgtttagtatttgtaggtatttttgggtttgggtgacggtggttgtttgtatatagtaggggattaggaagtagattttagattttagtttttttagaataagggtcgttttttgtttttagaataagggtcggttcgaatttattttagagtaaggattgttaggtgcgttatagcggatcgtttagtataggggattaggtagtaagcgagatattgaaattatatttggaaaaatgtttaatttcgaggaaatgttttaagttttttataagtggagaaaggtagatggggttttaaaaattatttggtgtagtagaatttgaggttcggcggttagcgaaggttttacggtgtgttcgatggttaggggttgtagtggatggggacgtggaggttgcgtaggaggtattttggaggttggatattttggaggtttttgggtttgagttttgtatataggttagatgttttttatagttagttttaaacggtgaaggggttttatttttaggtggtttggaatgtttttatagttgtttggtggtggtttttatttaggatttagtagggtattcgttataggacgttttcgtattcggtttcgttttagagtttttacgttttttgtttttagttttaggggttattttaatttggttacgttaagttatggtttttgtatcgagtttagtttgttgttttgggcggtgaatagattgtgagtgtgggggaggggaggagtgttttttaatattttttgggggttttatttattttattggatgatagtagttgaggattaaggtttggttgggttttgagttggtatttttatgatgtttttgagttttagttttttttttgaaaaatggggagtattatgttagtcgttttttagcgttatagggttatgggggttgtaagagttaagatgaatttttgtaggaaggaaaggggttttgggtttagtatcgggagttttagttttggttgttttttagaatttattgtagagtttttaatataggtattttttaaatatatttatttattaggttattgttgatttttttttattcggattatatttttttggggtcggagtcggttttggggtgttttaaggttatttgggtttttatgagtttcgtcgttgttttcgtgtgtttattagttgtgtttatttttttacgtatttaggggtgtgttttgttttcgaaagtttttatagtagtcgtaaaggaggggtttggttgggttaatgttagtagggtttttttagtttattttgataatggtatttttatttttttggtagtaaataagggggaattgatttagtttagttttttggggtgtaacgtttaagttattttttttttagtattcgtagggggtttttgaagaagagagggttgtaggatacgtttgtttttttttttcgtaaattaggttttgcggttttattttatttgtttttaggttttttggttagtttgggaatagttttatttattcggggtatttttggaattttgttttagtttttattataagttgggataggaagtttaaagtgatttttataggggaggtttggcggtattgtattttaatttagttttttggggttttagtttttatttttttattgggtttttggagtggttggggtgttttgtatataatttgtttttgtttttttttagttttcgtaatgttcgttgtttagggttgtttttcgatttgtaggagaaggtttttaggttttaggttagtagatgtatttttgttgtgttaggattttagtttttttcgattgtttatattcgttggtttgataaagaggaatggggagttcggataatttgtgaatgaaaaagttttttatttatttgttaggggtttattttttttttaggttggtggggaggtgaggtttattttttttatttttggttttttttcggttatagttgtttatggggtattttcggttgtgggtggtgtaggggttgggagttgggaggtcgaggtttgtgtttttttcgggtttgtgtattcggtcgtattattcgtaacgcgggtttatgagcgtgtttggttgttgggtggtttgacgggtggatatcgaatgggttatttttttttttgttggtagaggatggaggtttaaggtggaggtgttgtcggtatagttggggtagattaggggagattttttatttagggatttttttttttttttttaggtcgttttttcgtaaaatgttgaggattggttttcgggtttgggttatatgggttattatttttggtttggggtttataggtagagatgttaatggaggtatataggtagtcgtattcgtattcgattagtattaggtttgaggttttcgggtttttttatgttttattttatttttatttattaggagtagaggacgtcgtggtgggtagagtttttagtttgggagttgtatagtttcgcgtttttttttatggaaaatttgtttttttaggttgtttggttgttgttatataaatatttttgttgtttttaggcgtttttttttttggggcgttgattttaagatgttattttaggtttgtagaagtgaggttagattttgggaggacgtaggcgagggaggtttttagtagtagttataggggcgggataggtcgtttgtattggttgtttttagagtgtttagtatttggtaagaggtgtgttaggaaaggtttgttggggttaggtgtgagatttgttttgttttttgtgtttgtttttgttattatgttttggggtttttgtagttttttttttaggtttttatagttttaggttttttttagtttttcggttttttcgtagggtaggtttagtttttttattttaggaggggcgtcgggatacgcgttttttgttatcgtatttattattttgtgttggggtggggagggggcgttgtttgtttttggtacgaggtcgtgaattttgcgtagggattatggtaggtattttggatttttggcgtttaattaggtttggtatagggtgttcgtgtttggtatcgtggtggagaaataaattagtcggaaggagtacgtgggaagggttgcgtcggcgttagcggtagattcgttcgattcgtttgtgttttttggggttattttaggtaggcggcgttcgggtaggaggaggacggtgatcgaggagcgtgtcgacgcgggttttttttgggggagcggggtataattcgttcgcgaggtattggtttcggttgttttttcggggcgttcggagttttttgtttagaggtcgcggcgtttttatttttcgcggttaagtgttcgggtaattacggttagggatgtttggcggcgatcgattttttggacgtttaaagtcgcggttacggggttttcgggagggagtgaagtcgttgggttaggggcgtatatacggttaggttatttttttagagttttgtttcgggttcggggttttttaacgtggttttagttgtttttcgttcggtttagcgtacggtgtatacggttgttcgcggtttcgttttttttatttcgtttcgggttttttcgtttatttatatgtaaattttagtcgttagttgtcgtcgagcgcggtaatcgttagagtcggattttttcgtagtttcggtttaaatttttggtttttgaaaatttttaaacgagaagtagttttaggcgttcgttttcgatttacgtcgcgtcgtcgggtttttttttttcggagaggttgggttcgggacgcgcggtttagttcggggaggcgtaaaggcggacggggcgtgcgggaggaggtggtcgcggagggggcggggggatcggcgggggtggggtcgggcggggcggggtcggcgggggcggagcgtatttcgattttgagttttattagtgtttcggtcgcgggagggagcgtaagggcgcggggcgcggggcgcgggcgcgggcgcgagcgtagcgaaggaacgagtcgggcgcggagtcgggttcgggggtttgcgagagtatagcgtcgttagttagtcggggaagagagggcgggatcgttcgtcgtcgtttcgggatcgtacgtcgcgcgtgtgcgttttagtttcgtcggttagcgtaggaggtcgtcgttcgggcgtagagggtagtcggtggggaggtatgtcgtcgtttttggcgtttttgttttgtttggcgttgttgttcgcgttcgtcgtacgaggtaggcgtttatttattcgcgagtttttatttttcgcgttttttggaaattttggcggcgttcggcgcgcgcgttttacggttgggagcgggcggcggggaggttagtatggagagggaaaagcgggcggttcggggcgtggggttttggagtttcgggattagggaggatcgattttttttttcgattttttcgtggaggcggattcgcgtcgttcgtgtttggagtcgagttaggaggtcggtgtggggtgttggggtttcggaggttttatttcgggttcgttttttattcgtcgcgcgtggggtttgtcgtcggtcggtcgggcgggcgggttgtttattatttttcgatttgaatagagtcggttttggttttttgttgttttttcgggttatttattttttttttttttcgtttttggtttacgtcggggcggatgttggggcgcggagtgtgggttttgcggcgtcgcgttcgtttttattgattcgcgcggtcgggttgggttttcgggttttcggtcgtttcgttcgtcggtgttttttagttcggtttttagtttgggggaggggttgcgtaagaagtcgtcgcgttcggggggattgaattttttttttgttttgcggagttgaagtttggaaagtttgggggcggagagcgggacgcgggtggggggtttttatattttttttcgtcgtatagcgagcggggtttttggggaatcgagtgattaatttatttttttttcgagagttggaggcgagaattatttgtttttttttagaaagtgcggttttgtgttatatttttttttttcgttttttagtttcggtaagatggggagggaggggtttgagtaattgattttttttcgagatggggtcgaatttttttcgaatgggggatttttattttttttttgtgggtgtatgggggttgttttggagatgcgcgttcgcggaggtaggtattgggtgtcggcggaggcggggtcgcgtttttagggtgttgtttcggtgtttttggaggcggtttcgattttataatgggtcgttttgattttgaggcggaggtcggcgttttgttggcgggcggggtagcgggcgagtagttgtcgtatttttttacgggcgggagttgagtgtggttatttttttttttttcgtttagttttgtttttttgtagaacgggtttgaatagaggtaatttcggcggttggatggggggttttgttttgttagattttttagtgagtttttagggtggggggtaacgttttggagagtagtttattttgtttttgttttttttttattgcgtttaggcggtatattaggttattttattttgttttaagtaggacgtgttttttgttgttttttttttttttatttttgattatagaattttgggtagaatgttgacgtttttttggttttatggaggggttttttgcggattcgtgttttagtaatttatgatattgagtagagtgcgttcggggtagggggcggacgatgttttttggttgggtgtaggttttcgtttttagggtaattagggttttcggtggtggtggtgcgggtgagattgatttttttttttttgtttttgtttaggttcgcgatgtttttagttcggtgagatttgtttgaatggcgggaagtgtgaagcggttaatggtacggaggtttgcgtgtgagtattatttttgcgggatttgttgttttgtcgagggtagagtttttgttttttgtagtcgcgtaggggatagaatattaggttattgttttttggagatggtttagagtttgggtacggttacgtgttgatttttattggataaagtttggtaattatttaattattagtaattatgttgcgtgtggagttggtttggttgttgagggtttgggtattttttcgtgggttattttaggtttcggggttattaagtgggagttttagtattttaatttttttttaagtttttaagaaatagttgatttgttaggggaagttttggattatttattgagaggtttagtttttattattttgttaatttggggcgttttttttgggcgggtgatgttttttgggtataggtgatgttttttttcgggggtgatgttttttaggtgggtggtgatgttttttgggttggtagtgatgttttttttggtataggtgatgttattttttgggcgggtgatgttttttttgggtgcgtgatgttttttgggttggcggtaatgttttttttgggtataggtgatgttattttttgggcgggtgatgttttttttgggtgcgtgatgttttttttgggtacgggtgatgttattttttgggtgggtgatgttttttttgggtggtgatattttttttaggtgggtgatgttttttttgggtggtgatattttttttaggcgggtgatgttttttttaggtataggtgatattttttgggtaggtgatgttattttcgggtgggtgatgtttttttaaaggaaattgattttttaaaatcggattcgtttttgggttttttgtttgttttagtttttttttttcggttttaggttggggttggggaagagaaggtggaatttatgttttggcgtggggtgtggggtaattattgagtttggtttttgttttggtatttgtaaattttgattttaaaatttcgtggtttttttggtttgttagttttagatgtaaaatgggtattgagggggtcgggaagtcgtgcggaatcgtttttttttgtttgtttgtgagtgtttattagtcgtggggaattgttttgttgtggtcgatgttttttaatttgagtttatttttgatgagaataatgaggaggtgtttggtgtttggaaaaagagtttttttcgttttttaggagttatagatgaagaaatggttttttagttagtttgcgcgtttttattttaattgtagaaggttttatttttttgataattttagttcggtttttgtttgtgtcgattgtttagtttgtgggtagtaggtttttttttttttcggtttttattttttttaaattgaagttaattaagtaggtttgtgagtagtttaatggataaagtcgattgtgtttttgttagatattaatgaatgcgtattatttttttttttttttttttttttgttttttggggtttttttttttttttgtagaagtcgtacggacgtttgatgttttaaattttgtttttttttatttagagatcgatagttgggatttaggggaagtgtagtagttattgttgggggaggcggattaatgtcgtgtgattaattatgcgtggttttttagaatgtataattttttttttcgttattgcgttttcggttcggattttgttttttatttattcggggttttgggagaagttttttgtttttgtagaggattttgggagggtgggaggaatatcgtgttgggaaaattgggggtttgttgtttttttttagtggtattagggagtaggtatagtttggtttataggggtttgggattgaggtttttttgggttagagcgttgtgttttggggtatagattgttgtagttttttggtgtttgggttaaaattttgttatagggtcgtaaaatattggtgttatgggtttatttttttattttttaaatttgggatttcggtgagttgtttttagtttaaggtaggtcgtcgattatggttttggtgtttggttttgttttttttgttggggtttggcgtttttttttttttggcgggaagtttgttttagtttggtttgataggtagtcgagtttagtttatagagattttattgtgtatattttataagtttaacgagaagatgggacggaagcgcgtttttaggtttttgtttttgggtcgtagagttggaggttagggttatagtcgagttcggtttgtggaggtataggttagggtttatatagtagtttgggggatattgtagtcgtttcggagaaggtttcgggttttttttttgggtttgagttttatttaatatatattttttaggtgtttttgttttttcgtttttgtttattttttttagaaggtttaggaggtttgtttaggagttagttagggtatttgtaggaggtttggtttttttagtaaggggagaaatttatattgtttttcgaaagagtttggggtgtaggtttttggagttttgttagtttgagtgggaattttggtttcgtggtatttagttgtgatttcggaaagagttttggtttttggtgttatttgttgttttcgttgtagaaggggtatggttatgatgggcgttatagtgtttggtttattagtattgggtgaattatttttttttattttaaagagaaggaatttttatcggaagttgttaattaggtggttgtagggttcgggattggaaaaagtggttttgttggtgtaaaatgtttttttaggaggttagagtgtcgtcgtggtttggttagttagtggttaggtagaaagtatttggtagtatatgttggtgggcggaggatggttggtttttgggtagttgttgtgcgaggtgtggtcgtggtggttgtggtcggagatggtggttttttgagtaggtttagggggttattgtggtttttggtttttttttagtttttttattagtttcgttagtgtgagtaaggggtattgaagagggttttattttttttttttttgttttgaggagagttgggaagagttgtagggattttatttgtttgggtgagattacgtttttggtttgaaacgtttttttagggttgtttgcgtttgggttgggcgttgaggtagggggtagttaagatgttggttgttgacggtagagttagaatggtacggggcgttttttaggagttgggagaaatgggggtaggttgttatatttagtatttttaggaggatgtttagttgtttgttgggtggtgcgttttagttttggataatttcgtgtttgaggtttggtttggttattagttttgtgattttgggttattaggttatgtaagttttagtttttttagtatgttagtcgggttgatatacgttggattttttggtggtgtgtgaggattgtatgagaatcgtgtggagagggtatttggttagcgtttttttttttttcgtttttttttcgttggttgatagtgttggtttttagagttttttttttgaatgtttaattgattgacgagtgaatttagagaattttaaaggtgttgtttggtgggttgggtttggtattgtttggggagggatttgtcggttttggggaagtttattttttaggatggttttagtttcggggaagtttattttttagggtggttttagtttatagatacgtttgagcgtttgttgtgtgttgcgttttgttttaggttaggttttcggtggggatagggtagatatggtttttgtttttgtggagtttattttttagtaaggcgtgagagaggtatttagtttatatgtgggatatgttgggggtgtgtcggttcggtggtggtttggtatagttttcggtagtttcgtaaagttgtttggattaggtatcgataagtgagaagaagagatttagagaagtcgttattagttttagggttatatagtagtggtagaatttttattagttttgttttttttttttttttaagcgaatgtttttaaatatagttttagttagtttgagttgtttcgttatttttcgattataagcggattgggggcgtggtttttttttaaaagaagaggaaggaggtttaggcgggaagtgatttggttttgtagtcggtttgggaggttggggagggacggggtagtttttgttattcggtttggttttttttattgagttatttgtttcgttttgggcgtggttaggggaggaataggttgatttttttttttatgttgagttgagcggaaaggtttgtgataggattttttgtttatgtagaatttggtttttaagggcgttagggttagaaaaatatgtttaaaaatatgtagtattcgaggtgggtagattatttgaggttaggagtttaagattagtttggttaatatggcgaaattttcgtttttattaaaaatataaaaattatttaggcgtagtggcgtgtgtttgtaattttagttatttgggaagttgaggtaggaggattttttgaatttaggagacggaggttgtagtgagttgagatcgtgttattgtattttagtttgggtgataaagtgagattttgttttaaaaaaataaaaaataataaaaaaaattttatatagtgttaaatagaaagttttatttatttagattggggagatattaggaataggaaggtttggggcggagattggggtgggagtttggagtgttttgaaggaagttggttttttggggtaggttttgtttttgaatagtagttaatatgttttttattgaaaagaataataatagaaaaagagagagggagaaagaaaatagtaattttggtaggaagagggtagggtagggtagatagtgtattaggggaagtgtttttatagggtagagttgggtgcggggatttttagatgcgggcggtaaattggagattttataggagtcgggattggttttattttttattttttgtatttgtgatgggtagtagcggttatcggtgtttattgggtagttttaggtcgggtcgagggattgtatttttttgttgtggggaggggattttttttgttttatgtttcgtttataaatagtgaaaggatgtggttttgtagaatcgattgggcgtttagtttgttttttttaataatgtagcgatgatagttttatatttaggacgtcgttgttatttagtttcgtaaaagttttggtagacggtcgtttattttttaggtgtgttagtgtagtttttatttttagcgtataggtgggaaagttgtggttgcgagggcgtggggatttgaggtaggttggcgttagtttttatttttatgtgtaggtatatttagaatttttcggattttttttcgggttgaggaggaaatattagtagttttaacgagcggttggttttggggtattatatttgtgggtcgggttgcgtttgacggtttcgagttttttaggtagcgttggcgtttttttttgtggggttcggagtttcgaggggttgtgaagtagggttggttttgatttgttgtgttttttatattgttttttttttgggttttagtttttttatttgtatgtgattttttttttaattatagttagcgggattttggggcgggttgaaggcgtggtggtggttgtgggttttgcggcgaggtttgcgttgggttcggtggtcgttttagttggggaaggggtagtggttgtaggggtgggagggtggagggaagtttttttttaaagttgtttggttgggttttttttgtggttttgttttattttattttgttttttgggagtaaagggagttaaggattggtttggggatggatatgtatatggagggattttgggtgatgatttatttatattataaaatttgtttttttttgtttgttttttgagatggagttttgttttgttatttagattggattagagtgacgtagttttggtttattgtaatttttgttttttagatttacgcgatgtttttgagtagttgggattataggtatatattattatttttagttaatttttgtatttttagtaggggtagggttttattatattggttaggttggttttaaatttttaattttaggtgatttatttgttttggttttttaaagtgttgggattataggcgtgagttattgtgtatggttatttttttgttttttgagatggggttttattttgttatataggttggagtgaagtggtgggattacggttgattgtagttttaaatttttgggtttaagcgatttttttgttttcgtttttagagtagttgggattataggtgtgtattattatgtttagttaattttaaatttttttgtagaagcggggttttgttatgttgtttaggttgaaaatgtgatttttgaattaaagtatgttgttgtttgatatttagtttatttataagtttatttaattattatttagtttcgggatttttttattgtataaaatagaaattgtatttaaatattgttattttgttttgattgttttagtttttggtaattattaattcgttttttgtttttgaattcgttttttttggacgttgtttatgaatggaattgtgttataggtggttttttgtttttggttttttttattgagcgtgatgtgtttaaggtttatttatgttacgcgtggattagaattgtatttttttgaggattatattttagtttttagaagtattagggattggttagaggtggattttagtattttagtttttagatagtttagaggaggtaggtgttgggagggcgttcggggtggttttttggaagagatggcgtttattttgggtcggtgtagttattcgatagttatagagttttttagagggagttttggtatatttttaggtgaatttgtaggatggattggcgtgttcgcggtttttgttttgtttaggatttcgagataggtttataatttgtttttgggttttatttatgttagtcgttaagttgtttagtattttttagtttttaggaggtatatagtggggtcgcggttattgagcgtttatacgtttggtgttgtaagaatgtaaagtagagggtttttattgagtatttattatatgttgaattttggggtatgggtgggtacggtagatgtaggtttttttgggtaggggaggagtatgttttttaagaattaggttataggatggacgggtttggttataagttaggggtagttattgtagtttttatggttttttgtgtgtaaagttagtgttgtgggattttatttgggtgtatttgttgtggtttttaagtgaggtttattacggagtagtttttacgttggttgggatagggttagcggtagggagttttagattaaaggagcggcggtggttggggtagcggggggtagtgaggttttggatatatttatggggcgggtaggtattttagtttttattcgtttagtttgtttgtttcggggtttttttttttttggatagagttttgtgtgattggttttaggttgtttttttttttggatttttagggttagtttagagtgattggttatgttttggtttagatttaggttcgtgtgataggagagagttaggaatttggttttttattttgagatatagatggtgttttttttaagttgtttttgggacggggaagcgttatgttttttgtagggtattaggttagttagtggtttttgatagcgaggttttgtttgtaggtagttgggggatttttttttgtcgggaggatgcgtgcgtgttagtatcggggtgtttggttgttttaggggtggtgtagggcggttataggcggttttagtattttggggttgtttttagtgtattttcgagatttgtggaattttgggaggagaaattttttagtagtgtttttagtgcgtttttttattttgtattcgttgtttttgggagggattttgagtgtttttttttatttattatgtatttattgttttaggagggattttgagtgtttttttttttatttattttgtatttattgtttcgggagggattttgagtgtttttttttttatttatttttattttgtatttattgtttttgggagggattttgagtgattttttttttatttattttgtatttattgtttttgggagggattttgagtgtttttttttttatttattttgtatttattgtttcgggagggattttgagtgtttttttttttatttatttttattttgtatttattgtttttgggagggattttgagtgtttttttcgatttattttgtatttattgttttaggagggattttgagtgtttttttttttatttattttgtatttattgtttttgggagggattttgagtgtttttttttttatttattatgtatttattgtttcgggagggattttgagtgtttttttttttatttatttttattttgtatttattgtttttgggagggattttgagtgtttttcgtttattttgtatttattgtttttgggagggagatttttgtagaggttttatttttgaattttttatttataggtttaggggtttagggttgggggcgttttgtcgtttatattttagattgagttcgtacggttaaatagggtttttttcgtacgttttgtttaatgtaaagcggtggtttcgggtgggtttttaaggggttttgtgaattttgggggtttggttttttttatttggttgtattcgttgggcgggagattttatttttcgagtttttagttttttagttttagttgtagtttagatattagggttttgtggggcgggggtggggtagcggtttttttaggtttgtggggttgttttgttgtggtttttgtaattttttggaaggaggtttggggtttggtgtttagtggggtttgtggggacggattcgggggttttgtggggagggattgggggttttgtggggacggatttgggggttttgtggggagggattggggggttttgtggggagggattgggggttttgtggggagggattcgggggttttgtgaggagggattggggggttttgtggggagggattgggggttttgtggggagggattgggggttttgtgagagggaattggggggttttgatgtgttgggcgtgtataggggaggttttgtttttgatatttatatttgtagtttttaggtatatatagcggttttatcggggttttcgtaattatagtttgtgagtggttattattaagggcgttttcggattaggttaggtttagatgttgttcggatttaatttttatagcgtttgtcgttatagtagggattaatggttatagaatatttattcggttttatttgtacggggttgtttagtttggtgggtattaggtgggcgttgttttcgtttagtgggaggtttgttagttttttggttgttagttgagatttttttttaagaaatagtcgtgttgttttttttgtttcgtttggtattgaggttggtgatacgtttcgattttgttttaattggtagatgagaatttgttattagatgtcgattttgtttacgtagttttttggtttcggagtttattgtgtatttttgaagggtttgaattggttgtttaaagttgggtaaatgtttttttgatattttgttgatattgttaatttgttgaataaatttttttataggtagtataggaggttagtttcgttttagtttgagttaaggtttagggaggtaggttttgtgtggagttagtttttttgtgagtgtagcggttttgtaggatgtatcgggtttgagaagtggattttttcgtttttcgttatattttaaaagtttttagttatgagggtaggacgaagtcgacggtcgttttcgtgtcgagatgataatcgggtatagaggcggtggtttttagttttttgttttttttttcgtagtggggttatttagcgtgatttatggttcgagttataggtattcgtttagggagttacggcggggagatttggttttattagagatgcgttcgtgttttattaagtttaaaggaggaaattggcgcgttt

SEQ ID NO: 147 - DNA, 3286 bp, Artificial Sequence
  chemically treated genomic DNA (Homo sapiens)
agaattcgcggttaattttagaggattggtgagggttggtttgggatgaataaatattcgatatttgacggttttttttttgcggtgatttttattaagtcgaagtggcgcgcgcgcgggtaggcgggagtcgggatttggttcgcgcggcgtcgcgtattcggatttcgaggttacgtcggcgagcgcggcgcggggggcggggagcgggatagcgggatcgttcgggttaagcgattgttttaaagatattttttattaagatttttttgtattcgagttttatttttttttggtttaggaaagttttcgtgtaagtggaagacgattttttttataaagtgttgtatgttattgtgtttcggatcgcgtacgaatattatttagtcgtgggtgaagttttttacggtgggttttttttttatttgggcgcggtgttttagttttagttttatttgtacggtatattgcgggtagggggaggagagatagtcgtgaataataggaaggcgaggtttcggtagtgaacgttgcgtttgatatttttttttttttttttgaaacgtatataaaaggaaacggcggtgttttttgtatttacgttttacgcgcgtgggcgcgtatattttatatttttaaatatattcgttcgttcggttcggtttggttttaggcgtttcgggtttcgtatttatatcggataggattgtaacggaatgttatttttagtcgggaagggggtcggggaaaagagggagaatatatttagttacgataagtacgataataaatgtatcggaaataaattagaaggcgatgtcggggcggtttttcggcgtgggaggggaggtggttgggatttagggggatcgaagggtttttggcgagtttttttttcgaaagtatcgcggcgataggtatacgtcgaggaagtttttgtgtacgtgtgtgtgcgtgcgtgtggagcgttgtgttaggcgaaatggaaattataggtagtttttgttgatgggtataaattttcgtgtttttgttacggggttcgtgtataataaaaatgagacgtcgttatatatattgaaatatatatatacgttcgtaggaaaatacgtcgaggtatttataatttagagtatttcgtattttttagcgaaaagttttacgcgatcggcgaggttagtcgaatcgagttttcgtaatatatttttaagagtttaagtggttttaaagtattttttatttttttttaaaaaatgaaatttagaaaggtagggcggcgggcggatagtcgtcgagtttcggttcgcgtttagtatttttcggcgttggggtaaagttgcgtgcggtttcgtcgttgttagtttcgtatatttcggtttatatacgcgcgtcgcggagaacgtattatcgtagcggtcgcggcgttttgcggaggtgcggtcgtcgaggttgttcgtcgcgttttcggattgtgttcgtagttttcggcggcggcggttgaaatatggttgagttattattcgtttttttttatcgtgtgtgtgtgtgtgtgtgagtgcgcgcgtgtgagcgagagggagtgtgtgagtgcgttttttgtgattgtaaagaggcgaggagggagggaggcgcggggggtggaggggcgagtgtgagcgtgtgtgagtgtgtgtgtgtttgtgtgtttgtgtgcgcgtcgggggggggtgggggaggaggggagcggaggttgagggagaggcggtagttttttgtaagtcgtattaatttttttttaattggaatcgcggagcgttggcgttgtttgggttgcggcggcgtagggcgaggaaggaaagtgggggagggtttttattattatttttgcgcgtatttatcgagttagttatgtttgggggttcggaggtttgttggggtgttgtgtggtatttttttttttttcgtttttttttagttgtaatttatgaagaggttgttatgaatgagagcgcgtttaggagcggagggtagatggcggatattttttgttttttttttttcgcgttcgtttgttcgttcgttcgtttattaaatttagttttaaaagtaaaagtagtagtagtagtagtagttttagggtaaagaagatgattgcggagtatgcgtcgtggcgtttgatattcgggtttcgagttttatagggcggagggagggtttgcgggcggggcggagcgcgcggggaggtagagcgagcgagttagggggagttcgaaagagttaattatttgttatttttcgaaatttcggcggttcgtagcgttatattggaaagtttcgtttaaagtaataggtttttgttgggggggtggtagggaggggacgtaggagtggggagagcggttagttggggagttattttagtttttgtgtaaattttgttcgttttataataaaaaacggattaaaattgttggaatgtagttattgtttagagtttttagtagtcggagagggggtgttaaattaagtttttagttagtacgtacggggaggagggagtgggtttttttttattttttattacgtatttttgtggttttgtgttgaaaagataagaatttatatttaaataaatttatttaaagagagcgagagaaatgttattttgtaaaaaacgagtatgaaaatagtaatgattgaggttgttttaattcgtaacgattttttggttttttgttttatttatttataggtattcgttcgttatttttatttttcgtttttttgttatcgttatcgaaaatttgaaaatgaaatgaataagggagaaataaggatgttatttttttgtaagggaacgtttttcgttttggtaattttcggttgggaagttttataaagcggtgtttaggtgaaagtaagatatttgggagtgtcgggtatagattttcggggattaggtttggagttgtttttttcggggggtttttttttttgatagtttattgagttgtattagaacgtggaggattgttttttgaggacgcgcggggtaatcgggagttttaaaatagtagataaagttaatattgattgtaatgtgcgtaaattggattataatttttaggcgtattggtgataattagcgtaatttatttttgagtattaattcggttagattttcgggtgatagttagtcgtaggagtgtttttagagtcgcgtttttgtaaatgtttttattcgcgttgtatttgattttagtggtcggagatagaatagcgcggttacgcgtggggcgcggagagg

SEQ ID NO: 148 - DNA, 3286 bp, Artificial Sequence
  chemically treated genomic DNA (Homo sapiens)
ttttttcgcgttttacgcgtggtcgcgttgttttattttcggttattgagattaaatataacgcgagtgagaatatttgtagaggcgcgattttgggaatatttttgcgattggttgttattcgggagtttaatcggattaatatttagagatggattacgttggttgttattaatacgtttaaagattataatttaatttacgtatattatagttagtattaattttatttgttattttaagattttcggttgtttcgcgcgtttttagaggataattttttacgttttgatgtaatttagtaggttgttaggaggggaagtttttcgaagaaaataattttaagtttggttttcgagggtttgtattcggtatttttaggtgttttgtttttatttgggtatcgttttatgaagttttttagtcggggattattaaagcggaaggcgtttttttgtaaggaaatagtatttttgttttttttttgtttattttatttttaaattttcggtggcggtggtagaagggcggggagtgagggtggcgggcgggtgtttgtgagtggatggggtagggggttaggggatcgttgcgggttagaatagttttagttattgttatttttatgttcgttttttgtaggatggtatttttttcgttttttttaagtaagtttgtttgggtgtgagtttttgtttttttagtataaaattatagaaatacgtggtggaaagtaaaagaaagtttattttttttttttcgtgcgtattagttaaggatttgatttaatatttttttttcggttgttgagggttttaagtagtggttatattttagtagttttaattcgttttttattgtagggcgagtagagtttatataggggttgggatggttttttagttggtcgttttttttatttttgcgttttttttttgttatttttttagtaggaatttgttattttaagcgaggttttttagtgtggcgttgcgggtcgtcggggtttcgggaggtggtaggtgattggttttttcgagttttttttggttcgttcgttttgttttttcgcgcgtttcgtttcgttcgtaagtttttttttcgttttgtgaggttcggagttcgggtgttaggcgttacggcgtatgtttcgtaattattttttttattttggagttgttgttgttgttgttgtttttgtttttggggttgagtttaataagcgagcgagcgagtaagcgagcgcggggggaaaaaggtagagaatgttcgttatttatttttcgtttttgggcgcgtttttatttatagtagtttttttatgaattatagttgagggggggcggaggaggggggggtattatataatattttagtaaattttcgggtttttaggtatggttagttcggtaagtacgcgtaaaaataataataaaagtttttttttatttttttttttcgttttgcgtcgtcgtagtttagatagcgttagcgtttcgcggttttaattagagaaaggttggtacggtttgtagggagttgtcgttttttttttagttttcgtttttttttttttttattttttttcggcgcgtatatagatatatagatatatatatatttatatacgtttatattcgtttttttatttttcgcgttttttttttttttcgtttttttgtagttataagaagcgtatttatatattttttttcgtttatacgcgcgtatttatatatatatatatatacggtggaaggaggcgaataataatttagttatattttagtcgtcgtcgtcgggagttgcgggtatagttcggggacgcggcgagtagtttcggcggtcgtattttcgtaaagcgtcgcggtcgttacgatggtgcgtttttcgcggcgcgcgtgtgtgagtcgaagtgtgcggggttgatagcggcggggtcgtacgtaattttgttttagcgtcgggaggtgttgagcgcgagtcgaggttcggcggttgttcgttcgtcgttttgtttttttgaattttattttttggggggaggtgggagatattttggagttatttgggtttttgaaagtgtgttgcgggggttcggttcgattggtttcgtcgatcgcgtggggtttttcgttggggggtgcggggtgttttaagttatggatgtttcggcgtgtttttttgcgggcgtgtgtgtgtgttttagtgtgtatgacgacgttttatttttgttgtgtacgaatttcgtggtaagagtacgggagtttgtgtttattagtagaggttgtttgtagtttttatttcgtttggtatagcgttttatacgtacgtatatatacgtatataaagattttttcggcgtgtgtttgtcgtcgcggtattttcggggagggggttcgttaggagtttttcggtttttttgggttttagttatttttttttttacgtcgggaaatcgtttcggtatcgttttttgatttgttttcgatgtatttgttgtcgtgtttgtcgtggttgagtgtgttttttttttttttttcgatttttttttcgattggggataatatttcgttataattttgttcgatgtagatgcggggttcggggcgtttggggttaagtcgggtcgggcgggcgggtatatttgggggtgtggagtgtgcgcgtttacgcgcgtgaaacgtggatgtagagggtatcgtcgtttttttttatgtgcgttttaagaaggaggaaaaaaatgttaggcgtaacgtttattgtcgaaatttcgtttttttgttatttacggttgttttttttttttttgttcgtagtgtgtcgtgtaggtgaagttggagttggggtatcgcgtttaggtgaggaaaaaatttatcgtggagggttttatttacgattggatggtgttcgtacgcggttcggagtatagtaatatatagtattttgtggagaaagtcgttttttatttgtacgaaagtttttttaggttaaaaagaggtagggttcgaatataaaagggttttgataaaaaatgtttttgaaataatcgtttggttcgggcggtttcgttgtttcgtttttcgtttttcgcgtcgcgttcgtcggcgtagtttcgggattcgggtgcgcggcgtcgcgcgggttaggtttcggttttcgtttgttcgcgcgcgcgttatttcggtttggtgaaagttatcgtagagaaaggatcgttaggtgtcgagtgtttatttattttaagttagtttttattagttttttggggttagtcgcgggtttt

SEQ ID NO: 149 - DNA, 23717 bp, Artificial Sequence
  chemically treated genomic DNA (Homo sapiens)
tttttgttgcggtattttagtatgacggaggtttatttttggtttttttggagtatgaatattttttgaggagtattggttttggttttgtaggttttgttgagattggtttagattttttggtttaggagtaatcgttatttaattttttatttgtaaatttcgttatagaatcggtttataatcgttttttcggaatttcggcggattagttttgtttttgtgtttttttttttcgtagagttattgtttttttaggttttttaagtgtatttaagagcgggagtttggttgtttttagtattcgcgtttcgttttgtagtttgataagtttgacgttaaggtattttttcgagagtcggtttagtagttgttggtaggagagtggttttagggtagcgggaaggggattttcggggagagaatgaggtttgcgtaagggttttggaaggatttaggagtcgtttcggttttttttttttaggttttggttgggcgtcgtgggtcgcgttttagttgagttcggcgtggtcgtttaatggcgttttttcgcgatcgaggacgaaggggtttagagaggttgtgtttaagcgacgttgcgaggttaggtcgcgtttcgggttagggcggtttttttgttatcgtcgtttttggtcgttaggattaagtatagtacgtagcgtcgcgaaaggggcggttttggaaggcgcgaaggggttttcgggtttcgcgaatacggcggggtcggggcggagtcgtgggttttcggtcgagcggtcgtttagagtttcgcgggatacggacggttttagttcggtttttcgcgagttttacgcgtttgtgacgtcgttgatgcgtagacgtcgcggttgtaggtttcgttttttcgtgtttttcgtaaggttttttgggagttgtagttttagttttttttcgggtcgttttattttttgataattttggagcgcggcgtttttcggggatcgaggtttcgggttcggtcgtttttagtagcgagggtaggagaagtggttcgggcggtcggcggattgggagggcgttattcgaggattataattttcggtttgtttcgcgtaggtatcgtttcgagttttcgtttcgtcggcgtcgcgtagttttgtgggagtcgtagttcgggcgcgcgatttatagcgtcgcgtgcgtttcgggcgcgtcgtagtcgcggggttcgggtcgggcgttacgttacgaaggtagcgtaaggcgggcgtcggacgcgggtaggggtcggggtcggagtcgggtcggggcgtttcgcggttgaggagcgggaggtcgttcgggtagcgcggtcggcggcgagaggggtttcgtcgtttttcggaggtagaagttgtggatcggtcggcgggggcgagcgggttcgggggtcggggtcgcgttgttcgggtcgcgaggacgaggcggcgtcgtcgggttgtggaggtgagtttcgtcggtcgggttcggtcgggcgtttagtcggggatttcgggcggggagcgcgggttcggagggcggcggggagcgcgggttcggcggggcgtaggaggtttcgggggtcgggcgcgtcgggtttcgagttagggtagggacggtagggttttcggagtggggttagttcgtcgttcgttggcgtttttaggttggtgggggttagggttgggcgatgtttcgtagaggaatttagaggaaggcgggaagtcggtagggatttgggttatgtgggttatttgaggttagtttcgggggtcgcgtatatcggaggcggtttcggttttgtttgtttttgagtgtttttatattcgggtttatcgtgcggttttggtcgttttagggatgttgtgtttggtgcgggtattattttttttatttggggaacggtttgggggcggttatttggcgtggaggggttggcgggagtttcgtttgtgttagttatgttagtgttttttttcgtgtttttttggggttgttgcggtattagttgggaagttgtaaatttgttgttttttcgttggttgtagaaggggtttttttagttttgatcgggggaatttttgtgtggttagttggttttggtcgggcgagttttcggggtttttttattgttttggagtttgttatcggattgtaggtaataagattcggaaagtaatggtgaggtttagaatttgaggttaggtttgggtgtgtggggttagtggggaagattgggatttcgttgggtgttgaagagttgtgtgtttttttttcgggaaattcggatttttttttttgtttaggtttgaggggtgcggaaacgtgagttatagtttagtgtgggagtgtttcgtaattgttttcgcgtttttagagtttggggttgggtaaggatataggggtgattttttttttcggttttgagtgattttttaattgtgaagtggggtaagagaaattgtttttttggtttgtttgggggaggtaggttttgtaggaaattagtttggtttggttttgggttgggtgtgttttgtttttttcgaggtttttttgtttgcgggaggagtattttttttttttttgtttttgtttgtgtttgaggttttttagagttttttgattggtagaggagttagtgatttttgagtttttaggagagttcgaggtttagtaattgtataattgcgtagggttttttgtttgggtttttatagatcgtggtttttgagagtaggaagtggttggttttttgtaatgttgtatttgtgtgatagttttaagttttgttggtttttttttcgggtattttttatttgttttttgttttggttttgggtagtatttcggtaattttagtgttataggtgaggaatcgaagttggagatagttgtttatggtaggggaggggtcgagggaggttgagcgtttggttttttttttttgttggttttattagtttatacgaggtaattggagggaaggattttgttgttcggaaaatttttcggaattataggtgttgtttatgggtttgagtcgtttagtgaagaattcggtcgttggtggtcgagttgtttttggtttagttttttggttcgcggtgtgatgtttttatttatggtaataggcgtggataggtgttgagaaggaggacgatattattaaataaaatagtttggggtttttgaaaaatagtgatagaaatttaggaaggttggtgatttgttaggtttgtgtttgttttgggtggttattcggttttggatcgtgaggttgaaatgataggagatacggagggtgggtttgggtggtttttttataagatatagaagaaggaggtttttaattcgggggttgtttcgtgcgttttgtttttttgtttttttgttttgtttttttggttttgttttttgatttttggtatagtaggagtgtttagaagtttagtgggatttgttttttgtttaaagttttttcgtatttttcgtatttattcggtgtggatgtgggtttttttattattaggttgtgttttagttgtgtggagttattggttttttatgttttacgttggagagaacgttgaggtttgtgcggtttttatgtgattttgtagttggtttttggttttttattgtgggatttgtttgtagtatttatatttgggatcgttttgtttttttgttggatgtggcgtcgagggtagggttcgtttttgttttttggtaggtttagtgtttagcgttatgtagtcgtgcgtagagtaggcggttagtgagtatttggggttggtttttattataggtagttttgaatatttgggttttggtagtttagggggatttttgcgtgttttaggaaagtagtatagtagtttttgtggcgtggatacggttatatttgagttcggtttgtttttgagtttgagagaataggtttgttggtttgtgatttttgtatgtgtgtttcgttgtagggaggttgtgggttggggttggatttagattcgtttagttatattttgttattatgtgggttatatatagttgggtggagatttttcggtgcgtggtttagggaggtgtttgggcgtggagtttgtggatagttatattgtattattaggataggggttgttgttgggtttatagggtgtacggaatggggtttgtgggaggatgggggtattttagtttagggtagggatttcgtgggttttttaagatgagttgcgttaggttgttgttttgtatattttgaggggtttgtttgagtgttgtatgggaagttagtagtgtggtcgttttttttagaatttatttagggtattagggtggatttatgagtttcgtcgggttatgggtattagtttcgttattttggtttttagatataacgatttgttagattttttgaggttaaagggaagttttaagggttgttattttcgtttttttggcggttttagacgggatgttaggaggacgtagggttatcgttgttttttaaatgttatagtgattgtagcgtttgtttttttgtggaaggagtttgtttcgttaatgagggagtttttttttatggttttttttttatttttttttaaaaagttgttttttattttaatattttttaagttttatttttttgagttagggtcgtgttttgttgtttacgttggagtgtagttgtaattatagttcgttgtagttttaaatttttgggtttaagtgatttttttgttttagttttttaaatattgggattataggtgggcgttattatatttagtttttgttttttgtaagtgaagttttttaggtaggttgaattttttatattttttgtttttgtttgatttttattttttattttttatttttttgttttttgtaatgagaaaggtaataagttttggagttttttggagtttttgttttttttgaaaaggtggttgtagagaggttggagttgatggggaaagaggtgttacgaggttttttttgggttagggttatacggtttttaaggttttcgtttttttttttggggtgataggtgtttttagggttatacggtttttaaggttttcgtttttttttttggggtgataggtgtttttagggttatacggtttttaaggttttcgtttttttttttgggatgataggtgtttagggttatacggtttttaaggttttcgtttttttttttggggtgataggtgttttttgtgttttagaggtttttgtttggttattagtgaggttatcgggttgtttagattagggttgtttttgttattatatggtaagtagagaagtagagaagtgttaaaaattacgagtgtttgtttggttttttttttttgttaaaaatagaagtcggggttgggtgcggtggttgatatttgtaattttagtttttttagaggtcgaggtaggtgggttgtttgaggttaggagttcgagattagtttgattaaaatggcgaaattttatttttattaaaaataaaaaaattagttgggtgtggtggtgtgtgtttgtaattttagatatttaggaggttgagattgtagaattgtttgaatttgggaggcggaggttgtagttagtcgggatggtattattgtattttagtttaggcgatagagttatatttcgttttaaaaaaaaaaaaaagaaaaaaaagtagaattcggttgggtttagtggtttatgcgtgtaattttagtattttggaaggttaaggtgggtgaattatatgaggttaggaggtagagattagtatggttaacgtgacgaaatttttatttttattaaaaatataaaaattagttgggcgtggtggtgtgtgtttgtaattttagatgtttgggaggttgagatattagaattgtttgaattcgggaggtagaggttgtagtgagtcgagatggtattattgtattttagtttaggtgatagagtgatattttgttttaaaaaaaaaaaaaaagttagtcgttgtggtttacgtttgtaattttagtattttgggaggttaaggcgggtggattatttgaggttaggagattgagattattttggttaatacggtgaaattttatttttgttaaaaatataaaaaaattagtcgggtttggtggtaggcgtttgtagttttagttattcgggaggttgaggtaggagaatggcgtgaatttaggaggtggagtttgtagtgagtcgagattatattattgtattttagtttgggtaatagagcgagattttgttagagaaaaaaaaaaaaaaaataggtgatgtttgtgttattggatatatttgtatattatttttatgttgattataaaagagggtgaggggtcgggtatggtggtttatgtttggaattttagtattgggggaggtcgaggcgggtggattatttgaggtttggagttcgagattagtttgattaatatggtgaaatttcgtttttattaaaaatataaaaattagttgggtacggtggcgggcgtttgtaattcgagttatttgggaggttgaggtaggagaatagtttgaatttgggaggcggaggttgtagtgagttgagattgtattattgtattttagtttgggtgatagagcgaggttttattttaaaaaataaaataaaaaatttaaaattaataaaaaagagggtgatggttgagtgaggagtttatggtgggttttatatagggtttaggaaggatagggcgggaagcgtgagtattttgtttatcgtagtgggttcgttatggagagtatgattttagagaagtaaagtcgtttggttcgaagtagtggtcgttttgttgatagttgtagtggtcgggtggtattcgggttggggttcgggggagtttaggtggttatttggttgtgtgtttgtgtttgtttaagttgggtatttttttttggtagtgtttgggaagttcggtcgttttttttggttggtgttgttttgtagtttcgtttatggatttttgtttacggtttgttttttgtagtagggtcgggtcgtgggaggttcggataggattttgaatggttttgtttgcggttttggttggtcggaggttgatcgtattggataggttaagggttttaaattagggtagtgaggagtttgttgagtttttgttgtttttcgggttgtttttggcgttcggatagatatttaaggatagaagttcggatagtttttaaggcgaagggtttttcggggttgatttttcgggattttggtttttgtagagagggttggaggcggggttttgtgttttagggttagagtttttttggtggaagttgaggtgtttgattaaatgtttttttttttaggtagtagtttagacgcggtatagagagggtttgggagtttgttgtagttttaggtgagtttgtttttaagttttgcggttcgtttatgggtttgtttgcgttgtagaattgtttgtggagtagtagggttggagtgtttacggttggggggtttttcggagtttttgatttatagaatttttggaggtcggtagttttgtttgttttgaagagtttcgtttttttagtcgtttgggtcgtggttttgtcgtgggaggcgacggtgagggcggttcggggtttcgataggggtgtttgtttttttggggattttttttgtgttgtggtttcggtttttagatggagttttttatttttacggtagcgttggggttggggttggtgaggagtttgtgtacggtttttatcgttatttttagttaggagggtgtttggtttttggggagcggtttgtatttgtttttggagaatgttgttttgttagttgttatttggggcgggcggtcggagtttacgtttttttttagggcggggttttggttttgttttttgtagggacgatgggaagttttgtttttagtttttttattcgatttatgtaggagttttttgtttttggggttattttttttataggggttttagcgttagtggggataaaggtagagttgtttgtttttaggttgtgggtatcgattgagtttcgtttcggtagtggttggtttttgttttttgtttggattagtagtttttggtttggtgggtgtagttttagggcgtagtggggttgtcgtggggtaaggttaggttattagttgtttggatataggggttttcgttttttatttgttgttttttatatttttagttcgggtaggggtgatatcggggtatttttgttggggtcgttgtggtttttatggtggtaagatggttttgtgaaagattgacggagatgtagggtttaggagtaggtgttgtgtgagtgggatacgtttgtgttatttgcggggtaggggagggttcgggggtatagtcgtgtatatgattagttagcgagatagtgaggagtgtatgcggagtggatatagttgtgggtgtcgttcgcgtaaggttgggggtcgttgtgttagttttgtttttatgtgggtttttagttttttaggtagggacgttgatttcgggaggtgtttttgtttgtatttattggagttttaggagtatgcgtttcgtttttacgggttatttttattgagtttattatttatcgagaggtatttcgagattttgttttgttacgggtgggttgttaaggttagtattagagatttttagtagattttagtggtcgtagatggagcggggcggtaatggttattttcgggatttagttttgtgttgagtttcgggtagtgtgattattttggtttttttcgtgtacgttttttggttggatgttttttgttgtttttacggggtgtgtgtgtggtatataggatagggatcggttagttggttttgtttattaattatttgtttttatagggtagtggcggttttatttttgtaattttttgaggttggatttaggttatcgtttcgtttaaaattagggtatcggtttttagggagggcggggagttgtatagttggatttgtgggggttaggtatggatttatatagttcggggtttttcgtattttgtttttttagggagtttagaggcgggcgtggttgtagtttggttttgtggtagttatgagttacggttatttttgaggcgtcgttttgagagttagttttgtggttacggtttttgttggtttttattcgcgagtatttgaaatagtttggtttatagtagaggttcggggggtatatgtagtttacgggagtagtatagatgtttggtcggcggtaggttttataggagtagtagcggtttagggtatgtttttggggttaggggttagagttcggtatgttttgcgggggttttattttgttgtttttcggtttggtttgggtatattttttggtgatagtgtttttgtacgttttttttttttttcggttatttagatagggagttaggatgggaattacggattgatttgatttgcgttttcggggttattgtattgggtgatttacgtgtgtttaggttttgaggtgggtcggatttgggagtggtaggtgagcgttttttttaagagtttttggttggtcgtagtaggttttgtttttgttgtttttagtggttttggatatgataatttttttgtcgaggtttggtcggagttagtatttacggtcgagatgtagttagttttggttgggcgttgtttttgggggtggttgttggtgttgtttttttttttttttattattttttgttttttttttttggggtttttttatcggagttttttttttaaatgtagttttttttttttaggggaacgcgggttgggagtttattttttttttttttgagacggagtttcgttttgtcgtttcggttggagtgtagtggcgcggtttcggtttattgtaattttcgtttttcggatttaggttatttttttgttttagttttttaagtagttgggattataggcgttcgttattacgtttagttaattttttgtgtgtttttagtagaaatagggtttttttattttgcgtaggttagttttgaatttttgatttcgtgatttatttatttcggttttttatagtgttgggattataggcgtgagttattgtatttggtttgggagtttttttcgtagttgtttattttgtattagtatttgtttattatgagtggacggaatatagggggatttaggatttatagttgtattcgggaaggttagtagggtggatttcgggaagagtatcggtgttagttttttatagttatttttgcgatgggatttttaggttggtacgtggttggtagttgtgtttcgggagtttttgttttttagtgggtttcgttagttagggtagggttttcggtattttttacggggtttttgatttttttggtagcggatcggggcggtttagcgatattatttttggagattttttggcgtgtgttggaaaaatttcggagagggtttaatagagttagttgtttagtttttgtgatagggacgtttgtttttttttgtagggtttttttttttttttcgagtatttacgggaggggattgtgttgtttttgtttttttaggataggttttttttttgtttagatggggtttatagggttagttgtttgagattggttttagtttaagaaaggttttttgagtgagcgtaggggagtaggaggttggtgagtagttcgttttttgttttgggtgtagttgggtattatttttgttttgggtttaaaggtattagtgaggagtaggcggggtttggtaggagtttgtgtttttagcggtacgcgtgattttaggtgttacgtgggtgagtgcgtgggtgggtgagtggcgaaggagttgaggttggttttggtaggtgtgtagtttttatatagaacgggtagggtttttgttagagttaaattagtttagggtttagtgtaagtagtttttgtttcgtggtattttcgttagtcgtcgtttttatttaagttttgtttcgttttgattcgtttagggtttggttatagaaggggagtgtcggaaatgtttaattcgtttttcgtgagggatttttgcgtggtttgggttggggaacgtaggggtcgtttgggtggtttcggcgtttggcgtagttacgcgagaggttttgggttgatgcgtgggttttttgttagcgagtttgtttcgtgcgtgttgggttttcggttttgttttcgtgtggtattcgagatttcgtggatttcgtttgcgttttgtatgtttgagcgttgttttttgtggaggtcgttagtattggtggttgtagggtttgtagtgtggtacgtttagagattcggtttggagaacgggttttggatgttttcgttatgttttacgttcgttttatacggacgtagcgatgttttagatatttcggattatatagagtacgtcgttaaggtttgttttgtttgtttttttttatttgttttacgtggatattaggagattcgttacgattttcgtggtttcgtttatattgcgcggcgtttttcggcgtggtcgttaggtgttttttcgagggtaggtgtgagtatagggtggtttttgtggagaagcgtttgtaggcgagtgagttaggttgtgttttgttgatttcgaggtttgaattttatggaatttttattttttatagagtattgtttttttttttgatttttttttaattatttaaaaatgtaaaagttattgttgatttgcgggttggattaggtttagggttgggttttggttcgtattttatattggtttcgtgtgttttgtgatcgttttgtttacggggtaggtttgagttattataggatggtagggtttttagggtgtagggttcgtaatgttttaatttttttacgattttagtatttttagagaaaacggattttcgtgtcgagtgaagtggtttaggcgaacgttattattatacgggggattcggcggtttttgttttaggttttaaaggagaggggatttagaattttttgttttatttttttagtttttgtttttgaagtttttgtttttaaggttgtggggaggaattagggaagggttggcgcgtttgttgtgcgattttaggtgttcgtgtttcgttgagtttagtttttgtggttttagagttgtaggtttttttcgggtgttagagtattgattggaaaggttttttatatttttgttttttgttgttttttatcgtcgcgggggagaagttggaattgtatttttattttttttagttcgtttatttagggttgtttttaggtttttttgagttttaaaggatatgttttttggtgttttttttttttttggttttgttttttaggttggaatgtagttgtggtgtttacgttatttttttacgttagttttttgagtagttaggtttataggtgtatattattatattcggatagtgtttagttttttataaagatagggttttattgtgttgtttaggttggttttaaatttttgggtttaggtgattttttacgtacggtagttttgatatttatttgattttttttttttaagttttattttgacgttggttgtgtgttttagagatttaattagaagttggaagaagggttgtgacgtgtgtgatagtaggaattgttggttaatttatagtcggttagtttgtcgggacgttattttggttttaattttggtagggagaggggagtgtatcggattttggggagagtagttgtttgtacgggtagggttttttcgttttaggattaacgtttttaattgtatttgatttttttttagttagagggggtaaggtggtttttttagaagtataggtgggtcgcgtgttagaggttttggatagtttgtgttttttttaggttttttagtaggggtggttttcgtttttttggaggggagattttaggaatcggttttcgtttttagttatagttttatagggtttttgtttttcggggtttggttttgtgggtgtataaggtatggtcgggttttcgtttttttggaagtttttagagtggtatgtgggtagttgtgtgaagcggttttttagatttttatttagtttggtttgtagtagttttttacgttttttgttattttttttgtttatttttgggtagacgtttttttgatttttttttttgtgataaagtaaaagcgtgtgatttttttttttattaaggaataaaacgtttttgaatattatagacgtgatgtcgggtttttgggggtcggggggtgttttagggtttcgagggaggagttttgtgggtgtcgaagtcgggtcgtaggttttgtattgagatgtttttttagtttattttaggcggttgggtatgttgggaagttttttcgggttgtgtgtgtgaattatgttgttttttttttattttttttttttgtttgtttatttttgttgtgtgttattttgtttagtcggtcgttttgttttttttttttatgtttcgtttcgttcgttgttggttagaggtgattaggttcggtttttagtacggtcgtcggtcggggggttatggggagtttcgttttttttttggtcgtagagatcgagtcggattatagttttttcgggggatcgttttattcgggtttttcggtagcggttggttggtgtaggagcggtttaggggggttcgtttggggaggtgttttggttagtcggtagtattagtttttacggtttcgggttcgaaggtaagaggtggggaggggtggtttcggagggttttcgggggtagagggtttcgtttttagggtgttttttttttggtagaggtgtttgtagagaagtgggtttttgttttttttagttgtggtagtttttttttttagggtgtaggagttgagtaggtttgagatttcggtttcggtttggttggttggtggtggggatgggggttagtgcgtttaatttcggcggttttgtgttttttataggttgtgttgttttacgtagagaagttgtttttgaagtttttttttgggttggggtcgttggcggttgtaggttttgggtatattgtttgttgtttacggttttaaagttgttagtattcgttgggtttcgtttgttgttttttcgggggttataggttatatggtttggtggtcgaattttacgtgttggttttttatagttgttattatggttttggttattcgttgcgttttttaggagttgttattaggttttgaggtgtttggtttggaggtagtttaggtggtgaggtttggattggttggattttatcgatgtttttgtcgttatttcgttttggtttttattggaggtagggatatttaggggttcggggtttcggggttagtgttgtagtggtcgtcgttgtttttatagcgggtttaggtttggtttttgaaggtaatgtgtttgcgttttatatttaaaagggtttgttaggttgtatttggcggtagtttttacgggggacgatgttttgttgtttgttggtttttaggtgggagggacgggcgtggagttgtaggtagtgggtaaggttatggtaggtggttaggtttgggaattagtttttaggtggtatttacgttgaggtttgagtttcggtcgataaggattggggatgtaggggattagttaggggttgtgtgggggagttttggagttttgtttgcgagttatttcgatgaatagggagacgcggtagaggtagggtcggggaggggtcgtgtgggggagttttggagttttgtttgcgagttattttgatggatagagagacgcggtaaaggtagggtcggggaggggtcgtgtggggtttggtggtcggtagaggaagggtttgtgttttttttgcgtgtggtggtatcggagcgttttttagtttttggtgttatcgtattagtcgttttttagtgagtatttttacgtgtgtcgataatagttttgttgaggtagaatttattagatttatttgttaaaagagtgtagtttggttatttttagtggtttgtagagttgtgtagtcgttattgtaatttagcgttgtagtattttatagtttatagggatttttagttttatagtttagtgttatagtatttcgtagtttagagggatttttagttttagacggttattgatcggttttttgttttggtttgttttgtgtagaaggtgcgtggatgtggggttataggacgtggttggttgggtttgttttgtgtagaaggtgcgtggatgtggggttataggacgtggttggttgggtttgttttgtgtagaaggtgcgtggatgtggggttataggacgtggttggttgggtttgttttgtgtagaaggtgcgtggatgtggggttataggacgtggttggttgggtttgttttgtgtagaaggtgcgtggacgtggggttataggacgtggggtttcgtgtttggtttttttattcggtatcgtgttttttagatttatgtatttgtagttcgaggtagttttatttattgtttttttgcgggatgaatcgtattttatttatttatggacgttaggattgtttttacgtggtttttgtggataatgttgtgaatattgtttacgaggttttgcgtggatttgtttttatttattttgtatagatatttaggagtgggattgttggggcgtgtggtgaatttttataatgttttgaggaattgttaagttatttttcgtagcggttgtattatttagtttttatcggtaacgttggggagggttttggcgtttttattttttcgatagtttttgtcgttgtttgtttttgtgattttggtcgttttagggggtgggagttggtgtttttttggttttgatttgcgtttttttggtggttagttatgtggggtttttttttttgttttatttattcgtgtttgttttttttttatttatttatttatttatttatttagagatagggttttattttgttatttaggttggagtatagtggtgtgattatagtttattgtagtttttattttttgggtttaagagaattttttattttagttttttaagtagttggaattataggcgtgtattattatagttggttaattagaaaaaaaaaatttggttaggcgtagtagtttacgtttgtaattttagtattttgggaggtcgaggcgggtagattatttgaggttaggagtttaagattagtttggttaatatggtgaaattttatttttattaaaataaaaattagttgggcgtggtgacgggtatttataattttagttattagggaggttgaagtaggagaatcgtttgaatttgggaggcggaggttgtagtgagttaagattgtattattgtattttagtgtgggcgatagagtgagattttgttttaaaataaaaatataaattttgagtttgggagggtttaggttgtaatgagttgcgatcgtgttatcgtattttagtttgggcgatatagtgagacgttagacggtgttttaaaaaatttaaatagaaaaatgtagaaaggattgtcgttttttttttcgttttttagagggtagaggattttcggtttttgttttttgagtattaggtcgagttttagatttcgggatggtttttttagtttgtagttttcggtagtttcgggttatattttcgggatttttagggattggtttgggattatcgggggtggcggtcgtggttttggttatggggagggaggtagagtcgcggggtaggcgtggggtttgttgtgtcgggtatgtggggcgtgtgttagattttggatttggtttgcggggttaggtcgtggtgtatgatgacgttacgtcgtttttttttttttattttggttttttgtttggtttttttttgggtcggtatttttggggttatttttgttcgtgttcgttgttgtggggtttgggttttaggtagtttttgtttgttgttgtaaataggtttttaaggtgtatggtgaggagatttttaggttagagatgggcgagagcggtgggcgagtagattgcgggaaggtagttgggtttttatacgcggagttttttttattacgtgtatgtataggcgatttttgtcgtgtttcgacggagggcgtcgggattggggagggttagcgcgatagttttggcgtttattgaagagttgtttgtttggttcgttgttttggtggtcgttgaatttttttaacgttttaggatagtaggtgttgtggttttatgatcgtttttttatatggatgaaggggtggtgtataggttggtggagtttgggagagttagggtagtttgcggttatgcggttatgcggtcggcgtggggttgaggtttttgtatagttgatagagtgtttggcgtttttaattagtaagttatttacgggtcgggtatcggcggtttagtatagagaggtaataagggtagattttttttggtaaggttgatcggcgtcgggttgtggttagattaggagattgtagtttagttcgagggaggtattacgtttgttttttagagtattgagtagagttttttatggtatttttcgttttgggtatagtaggaggagttgtcgattaagtttggtatttcggtgtgtttcgagagttgtttgggtataggttgcggggttgtttcggtcggacggggtatttgtgtttttcggtgtggttttagggttttggtggttttgatcgaggtttcgggggatagaatgtagttttttgttttttattttttttaagaaaggggtcgttttttaggattggggttgcgttagttataggttcgcggtttttacgtttcgggtgttgttgtttcggttgttttagggcgggttttgttttgtacgtagcgagcggttttattattttttttttgaattggagttgagtgtcggtaacgtttagataattggggcgcgcgggttttttgtgttggatttttttgtatagttgtttcgattttttatttagtttggtttttgtgtagtaaggagcggttcgtcgttttttttacgtcgttttttttacgtcgttttttttacgtcgttttttttacgtcgtcgttttttttacgtcgttttttttacgtcgttttttttacgtcgtcgttttttttacgtcgttttttttacgtcgttttttttacgtcgttttttttacgtcgttttttttacgtcgtttttttttacgtcgtcgtttttttttacgtcgtcgtttttttttacgtcgtttgttttgagttcgtttttttcgaaggtaattattttgtagtagtgagggttttttgttgagtacgtgtggttgcgattttaggagcgttttgggttgagaattttaaaagggtttcgtttaggtttggttttgggtttttgggtttttgacgcgagtttttatttttaggttttggcggtttggttttaggaggttaaggttgtagtgagtcgtgcgcgagttattgtattattttgggtaattagattttatttttaaagtttaaaataatatttttgtaagggtttcgggtttttgagtttatgaatttgtttaggttttgtagaggtgagggtggttttagagtggttggggggttgtggagattagaattagggtagaagggtagggagggtgggggttttgtcgaggttttttatcgttgatttttgatttttggtttttttttatttcggtttatcgagagaggtcggtatagcgtagattgcggggttagtgatattttttttagcgtttttagttatagaagggtcgtggtttgttttcgttttttttattcgtgtttcggggttacgtttgaattttaggttttgttttgattttattgaaatttttttgaagtgtagacgtttttttgatttatttgggttttgttaggatgatttcgaaaggtgttttttagtagatatatttcgttggcgattgtttggttttggggattcgggtttttatttttttttttggagttggtgaggttgtttttgttagtcggtgataattatagggttaaagggagggtgtgttttaggaggtttagtttatttttgtttgtatttgcggttagcggggtgtagagtttgtgaaggtatttttcggagtgggggttgtaaagattatggttattgtgttatttataggggtttaggtcggacgtttgggttgtgtcgtttcggtagttaggtcgaggaacgtgtaggtgcggtcgggagttcgtcggttatagttgtatttatgttttttttcgagtggtgatggcggggagaggtttggttgtttacgggtagattgtttgggtttttatagaagttcgttgttagagtagattttcggttttgggtttttttgttttagttggacgttttgagtttcgtcgggtttagtttattttcgtttattttgttaggggtagtttagagttttcgttacgcggggttgagcgtagggaaggtagtattacggagttcgttcggttttatagaatattcgtgttgttcgcggagattttttgtttttgtgttttttatgaagaggtaggttttttttttttttgaattaaaagggtttagatggagtataagatttaggttatatttataagaataattgatttttttgttaggtagagtagttagtttgtttcggaggttgtgttgtggtgtggggaggttttttgtttagattagtttgtgttttttttaggtttcggtttatgtatttgttttttcgtaggtttgagtatttgtttttttacgtttaggacgatttggttttgagtttggtcgggattttttgttatttgtcgtttataggtttggtgatagagaaagtagtgttttggaatagtagttcggttgtggggtgtttagttttttttgtaggattttgtgtggtttaaggggtttgttgagtttttaacgggtaagaggggttttgagttatggatttattttgggtggaggtagtttttatcgtcgtttgttttaaatgtttagttttaggttttcggtttcgtagttttgtagttatagacgggtgttttttttaggtcgagaggagggtggggtttagttatttaggattttatagggtggttttgatgagtatttttttttgtagttatatttattcgttcgggtttatggttacggtcggagagtggttttgtgtgcgttgtatttttttgaattcggtcggttagcgttagtgttttatttgcgaggtttttcggtataagttcgattttaattatattttgcggtttagcgtggaggagtagaaatggttttgcgttcgttgtatttttcgtaattttttgggtaaggaggtttgcgaggtgtgcggttttatttcggagtttgcgtttggggttgtttttttgttagtttttaacggggttttttttaagttattcgttattttgggggagtttaagggtagttgttaggaggaagtaggtttagtgaggattgcggggttggtggttacggagttcgttagggggtagtgcgaggataaggacgaggaggagaaggaggagtaggaggaggaggagggagcggcggagtttagagggggttgggcgtgttcgcgttgtacgttgtataatacgttcgtggttagtttttgtttcgtttgcgggggtttacgtaggttttcgttgttacggattttttttgaggttttggtggtttcggaagtggtggtttcggtcggtttttacgtcgtgtttgtcgcgtttttatttggttttttcggggaaggtgtcgaggttaattttttagttattagttagggtttagttgtcgaattagagtcgtttagggtttcgttttttagttttttttcgtttattttgtagaataatttcgtgtcgcgtagtcgacgcgaggtttttttttagttgtagttatcggtgtttgaggttgtttagtcgttattttttgtcggttgtaggggagttttttagggttcgggttgggttggggtttttcgtttagtagagttgttgtttggtaagcggttgagtgtgttggaggaagaggttacggagggtggtattagtcgcgtagaggtcggtagttttatttcgggtagtgatattattgatttggtcggagatatcgtgcgttatacgttcgttagtttttttagtttcgattttattatttggttatgtgttaagtgtacgtttagaaattttatagtggtttttaggtgttcggtttgcggttgttttaaattgtacggtttttaggagtatggcgagttttttatttattgtttcgattgtggggtcgataagtttagtttttgcggtagaagttgcggacgggtgttttcggtttagaaggtcgttcgcgttttgttcgagcgttcgggttagtgggtttgttttgtttgtattttgtttaacgtattgcgggttaagtattgcgtcgtttgttatacgttttagtttttggtggtttagcggcggggggtcgcgtttttgaggcgtagggagagtatgtacgtggagtagcggcggtagatagacgagggcgaggttaaggtattttgggagaatatcgtggttttttgtcgggaggtgaggcgttttttcgttttttttttgtttttgagttttttgttttcgtttttttttttttaggttttgggttttggcgatgggttggggaggagtttataaggtttaagacgtgatggggagggtagtatttttcgtttcgaggttttaagtttttaatggttttggggtttagtttggttttttgatttttggtttttgttggtgatcgagatgtacgatttttattttttttaattttttatcgtggttaggagggtttcgagtttcgtttgatgtgtcgtaggaggcgagggttttttaggggtagcgtggagatttcgttgaagtgcgaggtcgggatgtattcgtgtttcgttttttagagtttaggatggtattatttacgggttaattggggcgtagtttgtattttttttagtagggttagggttagagtcgtgttgttatttattgggggttgcgttgtttttttgggtttatacgttttttgttttttatttgtcgttagtcggtggtttttttattagggttgagggttttttcgatatagggtcggcgttaggtttgtggttgtttacgttttattcgtttttttggggtttaggtagtgtttttgggcgtttttttgggtggggttttgtttttgttaggtggagcgaggttattttgtttagtttgagtatatggtcgtggtttttgtagaataatgtgagtttcgtggatgatagtttttttttcgggttcgagtttgtcggttttttcgcgggtgatagcgtgtagtagcgtgtgaggtagtggttgcgattttaggagattaattgtttcgtttttagggattatagggttacgtggtttgtgttttatatattgcggtttttagatattttgtaggggttgttggggaattgttggtgaggttttttttaaggtcggggtggggcgggtgggcgggcgatcggtcgcggttttcgcgaggttattttgaggttttgcgtaggtttttgagcgttttggcggtgttggcggagcggtcggatttggtggagcgggtgatggttacgcgtagtttgtgtgtagagggcgtttattaggtgcggttgtgtaaggacggtacgtggattacggtgttggtggacgatatgttgttttgtgatgaggtcggttgttttttttttttataggtggggcggtttgtagggtgggtacgggcggtaggggtagtttttgattttagtttcgaaaataaggtcggttgttttttttttttttagggcgggtagtgtggggggcgggcgggggtggtttttgattcggttttttgtaggcgtagcggaagtagttgtgggtggtttttatcgagaaggcgttggttaagttgtacggtttttattttgcgttttaggcgggtcgcgttatcgaaggtttggttacgtttatcggcgttttttgtgagagtttggcgttgtagtttagttttattaattttcgcgaggagttcgttgatattgattttatttgggttaaaatgttgagttttaaggaggttgggtaagaggaggggtattgcgtggttagtcgcgttgggaggagaggcgaggcggagcggtgggagatgtggggttggtggtttttgatttagttttgtttttacgaggtgtttttggcgtgggttgatttcgcgtggttaggttatagttttaattatttttttttttttgggcggggttggagttggtttttttatgttaggaaggttatattttggttaggtcgtggggcgagatcgatgtcgttatttcggagtaggtgtgagcggcgtgtcgagtttgatttgggtcgtggggcgagattgatgtcgttattcgtttcggggtaggcgtgagcggcgtgtcgagtttggttatattttggttagcgggtttgtgtttcgatttttaggggttttttcggagtgtttcggtgcgagtattttgaagttttcggagtttt

SEQ ID NO: 150 - DNA, 23717 bp, Artificial Sequence
  chemically treated genomic DNA (Homo sapiens)
agggtttcgggagttttaaggtgttcgtatcggggtatttcgaggaggtttttgggggtcgaggtatagattcgttgattagagtgtggttaaattcgatacgtcgtttacgtttgtttcgaggcggatgacggtattagtttcgttttacggtttaggttaaattcgatacgtcgtttatatttgtttcggggtgacggtatcggtttcgttttacggtttggttaggatgtggtttttttggtatgagaaggttagttttagtttcgtttagggagggggaggtgattggggttgtggtttggttacgcggggttagtttacgttaggggtatttcgtggaagtagaattgggttaggggttattagttttatattttttatcgtttcgtttcgtttttttttttaacgcggttgattacgtagtgtttttttttttatttagtttttttagaatttagtattttggtttagatgaggttagtgttaacgggtttttcgcgggggttagtggagttgagttgtagcgttaggtttttatagggggcgtcggtgagcgtggttaggttttcgatggcgcggttcgtttggagcgtaaagtaggagtcgtgtagtttggttagcgttttttcgatgagggttatttatagttgttttcgttgcgtttgtagagggtcgggttagaggttattttcgttcgttttttatattattcgttttgggagaagaggaagtagtcggttttgttttcggggttggggttagaggttgtttttgtcgttcgtgtttattttgtaggtcgttttatttgtgagaagaggaggtagtcggttttattatagggtagtatgtcgtttattagtatcgtggtttacgtgtcgtttttgtatagtcgtatttggtaggcgttttttgtatataggttgcgcgtgattattattcgttttattaggttcggtcgtttcgttagtatcgttagggcgtttaggaatttgcgtagagttttagggtgatttcgcggggatcgcggtcggtcgttcgtttattcgttttatttcggttttggagaaggttttattagtagttttttagtagtttttgtaggatgtttgagggtcgtagtgtgtggaatatagattacgtggttttgtggtttttgaagacggagtagttgattttttggggtcgtagttattgttttatacgttgttgtacgttgttattcgcggggaagtcgatagattcgggttcgggagggaagttgttatttacgaagtttatattgttttgtagagattacggttatgtgtttaggttgggtagggtggtttcgttttatttggtagggataagattttatttaggagagcgtttaaaagtattgtttgagttttaaagggacgggtggagcgtggatagttatagatttggcgtcggttttgtgtcgaggaagtttttagttttagtggagaggttatcggttggcgataggtgaggagtaggggacgtgtgggtttagggggatagcgtagtttttagtgggtggtagtacgattttggttttggttttgttggggagggtgtaggttgcgttttagttgattcgtgggtgatgttattttggattttagagggcggagtacgggtatatttcgatttcgtattttagcggggtttttacgttgtttttgggaagttttcgttttttgcggtatattagacggggttcggggtttttttggttacggtggagggttgaggggggtgaaggtcgtgtatttcggttattagtaaggattaagggttaggaggttaagttggattttagggttattgggagtttggagtttcggggcggagggtgttgttttttttattacgttttaggttttgtgggtttttttttagtttatcgttagagtttaaagtttaggaaggggagggcgggagtaggaggtttaggagtaggaagagggcgagggggcgttttatttttcggtagaaggttacgatgtttttttagagtgttttggtttcgttttcgtttgtttgtcgtcgttgttttacgtgtatgttttttttgcgttttaggggcgcggtttttcgtcgttgggttattaggagttgaggcgtgtggtaggcggcgtagtgtttggttcgtagtgcgttgagtagggtataggtagggtaggtttattggttcgggcgttcgggtaggacgcgggcggttttttgggtcgaggatattcgttcgtagtttttgtcgtaggggttgggtttgtcggttttatagtcggggtagtgggtggggggttcgttatgtttttggaagtcgtgtagtttggagtagtcgtaggtcgagtatttgggggttattgtggggtttttgagcgtgtatttggtatatgattaggtggtgaagtcggggttggaggggttggcgggcgtgtaacgtacggtgttttcggttaggttaatgatgttattgttcgaggtggagttgtcggtttttacgcggttggtgttatttttcgtggtttttttttttagtatatttagtcgtttgttagatagtaattttgttaggcgggaggttttagtttagttcgagttttggggggtttttttgtagtcggtagagggtgacggttgggtagttttaggtatcggtggttgtagttgggggggaatttcgcgtcggttgcgcggtacggggttgttttgtagggtggacgagaaggggttgaagggcgggattttgggcggttttggttcggtagttgggttttggttggtggttggggggttggtttcggtatttttttcggggaggttaggtggaggcgcggtaggtacgacgtggaagtcggtcggggttattattttcgggattattagggttttaggagggattcgtggtagcgagagtttgcgtgggttttcgtagacggagtaggagttggttacgggcgtgttgtgtagcgtgtaacgcggatacgtttagttttttttgggtttcgtcgttttttttttttttttttgtttttttttttttttttcgtttttgttttcgtattgttttttggcgggtttcgtggttattagtttcgtagtttttattggatttgtttttttttggtagttgtttttgggtttttttaggatggcgggtggtttggggaggatttcgttgaggattggtaggaaggtagttttaggcgtaggtttcggggtgaagtcgtatatttcgtaggtttttttgtttaggaagttgcggaaggtgtagcgggcgtagggttatttttgtttttttacgttgagtcgtaggatgtggttgaggtcgggtttgtgtcggggagtttcgtagatggagtattggcgttggtcggtcgggtttaggaaggtgtagcgtatataggattatttttcgatcgtggttatagattcgggcgagtgggtgtggttgtaagggaaggtgtttattagggttattttgtgaggttttgagtggttggattttatttttttttcggtttggggaaggtattcgtttgtggttgtagagttacggggtcgagggtttagggttgagtatttgaggtaggcggcggtgggggttgtttttatttagaatggatttatggtttagggttttttttgttcgttggaggtttagtagattttttgagttatataggattttatagagagggttgagtattttatagtcgggttgttgttttagggtattgttttttttgttattaggtttgtggacggtagatagtagggggtttcggttaaatttaggattaggtcgttttgggcgtggaagaataggtgtttagatttacggaagggtaggtgtatgggtcggggtttggggaaggtataggttgatttgagtaaggggtttttttatattatagtatagttttcgagatagattggttgttttgtttggtagaaaaattaattgtttttgtaaatatggtttgaattttgtgttttatttaaatttttttggtttaggaagaaagaaaatttgtttttttataagaagtataaaaataaaaagttttcgcgagtaatacgggtgttttgtggagtcgagcgaatttcgtgatgttgttttttttgcgtttagtttcgcgtggcgagggttttgagttgtttttggtagagtggacgggggtggattgggttcggcgaggtttagggcgtttagttggagtagagagatttaaggtcgggaatttgttttaatagcgggtttttgtgaaagtttaagtaatttgttcgtagatagttaggttttttttcgttattattattcggagaagggtatggatgtagttgtggtcggcgggttttcggtcgtatttgtacgtttttcggtttggttgtcgaggcggtatagtttaggcgttcggtttgggtttttgtgggtggtatagtggttatgatttttgtagtttttatttcgggaggtgtttttatagattttgtatttcgttgatcgtaggtgtaggtagaggtgggttgggttttttgggatatattttttttttggttttgtagttgttatcgattagtaaggatagttttattagttttagagaggagaatgagaattcgggtttttaggattaaataatcgttagcggggtgtgtttgttgggagatatttttcggagttattttggtaaaatttaggtgggttaggaagacgtttgtattttaggagggttttaatgaagttagaataaggtttaaagtttaaacgtggtttcgggatacgggtgaggagggcgaaggtaggttacggtttttttgtggttggagacgttgaggggagtgttattgatttcgtagtttgcgttgtgtcggtttttttcggtgggtcgaggtggaagggggttaggggttaggggttagcggtgggagatttcggtagggtttttattttttttgtttttttgttttggttttggtttttataattttttagttattttagggttatttttatttttgtagggtttgggtaggtttatgggtttagagattcgaaatttttataaagatgttgttttgaattttagagatggggtttgattgtttaggatggtgtagtggttcgcgtacggtttattgtagttttgattttttgaggttagatcgttaaagtttggaagtaaaagttcgcgttaggagtttaaagatttaaagttaggtttgagcgaagtttttttggaatttttaatttagaacgtttttgaagtcgtagttatacgtgtttagtaaggagtttttattattgtaggatggttattttcgaagggagcgggtttagggtagacgacgtgaggggagacgacgacgtggggggagacgacgacgtgaggggaggcgacgtgggggaggcgacgtgggggaggcgacgtgggggaggcgacgtgggggaggcgacgtgggggagacgacgacgtgggggagacgacgtgggggaggcgacgtgggggaggcgacgacgtgggggaggcgacgtgggggaggcgacgtgggggaggcgacgtgggggaggcgacgggtcgttttttattgtatagaggttaagttggatggaagatcgaggtaattgtatagaaaaatttagtataaaagattcgcgcgttttagttatttgggcgttgtcgatatttagttttaatttaaaagggaggtgatgaagtcgttcgttgcgtgtaagatagagttcgttttgaagtagtcgggatagtagtattcggagcgtggaggtcgcgggtttgtgattggcgtagttttagttttgggaggcggttttttttttaggaaaagtgaggagtaggaagttgtattttgtttttcggggtttcggttaaagttattagagttttgaggttatatcgagaaatatagatgtttcgttcggtcggggtagtttcgtaatttgtgtttagatagttttcggggtatatcggggtgttagatttggtcggtagttttttttgttgtgtttagggcgggggatattatggggggttttgtttagtgttttgaggggtaggcgtggtgtttttttcgagttgggttgtagttttttggtttggttatagttcggcgtcggttagttttgttagggggggtttatttttgttgtttttttgtgttgagtcgtcggtgttcggttcgtagatgatttattgattgagggcgttaggtattttgttagttgtatagggattttagttttacgtcggtcgtatggtcgtatggtcgtaggttgttttggtttttttaggttttattagtttgtgtattatttttttatttatgtgggggagcggttatggggttatagtatttgttgttttggggcgttgggagaatttagcggttattagggtagcgagttaggtaggtagttttttagtaaacgttagggttgtcgcgttgattttttttagtttcggcgtttttcgtcggagtacggtaggggtcgtttgtgtatgtacgtggtggggagggtttcgcgtgtggaggtttagttgttttttcgtagtttgttcgtttatcgttttcgtttatttttagtttgggggtttttttattatgtattttgggggtttgtttgtagtagtagataggagttgtttggagtttaggttttatagtagcgggtacgggtaggagtggttttagggatgtcgatttaggggagggttaggtaggaggttagggtgaaagagaaagagcggcgtggcgttattatatattacggtttgatttcgtaggttaggtttaaagtttaatatacgttttatatattcggtatagtagattttacgtttgtttcgcggttttgtttttttttttatagttagagttacggtcgttattttcggtagttttaggttagtttttggggatttcgggagtgtggttcgaggttgtcgggagttgtagattggagaggttatttcgaggtttgaaattcggtttggtgtttaaaaagtaggggtcgagagttttttgttttttggaaaacgagaaagggaacgataattttttttatatttttttgtttaagttttttgagatatcgtttagcgttttattgtgtcgtttaagttggagtgcggtggtacgatcgtagtttattgtagtttggatttttttaagtttagggtttgtatttttattttgagatagagttttattttgtcgtttatattggagtgtagtggtgtaattttggtttattgtaattttcgttttttaagtttaagcgatttttttgttttagtttttttagtagttaggattataggtgttcgttattacgtttagttaatttttgttttagtagagatggggttttattatgttggttaggttggttttgaatttttgattttaggtgatttattcgtttcggttttttaaagtgttgggattataggcgtgagttattgcgtttggttaaattttttttttttaattaattagttatggtggtgtacgtttgtagttttagttatttgggaggttgagatgggaggtttttttgaatttaggaagtagaagttgtagtgagttgtgattatattattgtattttagtttgggtgatagagtaagattttgtttttaaataaataaataagtgaatgaatgaaaaaaagataggtacgggtggatgagatagggagagaggttttatatggttggttattagggaaacgtagattaaagttaaggggatattagtttttattttttgggacggttagaattataaggatagataacggtaggagttgtcgagggagtggagacgttaggattttttttagcgttgtcggtgggaattaggtaatgtagtcgttgcggaagatggtttggtagttttttaagatattatgaaagtttattatacgttttagtaattttatttttaggtatttatgtaagataaatgaaaataggtttacgtaaaatttcgtaaataatgtttatagtattgtttatagaagttacgtggaagtagttttagcgtttatgaatagataaaatgcggtttatttcgtaaaggagtagtgaatgaaattgtttcgggttgtaggtgtatgaatttggagggtacggtgtcgagtgaagaggttagatacggggttttacgttttgtggttttacgtttacgtattttttgtataaggtaaatttagttagttacgttttgtggttttatatttacgtattttttgtataaggtaaatttagttagttacgttttgtggttttatatttacgtattttttgtataaggtaaatttagttagttacgttttgtggttttatatttacgtattttttgtataaggtaaatttagttagttacgttttgtggttttatatttacgtattttttgtataaggtaaattaagataggaagtcggttagtggtcgtttggggttgagggtttttttgggttgcgggatgttgtaatattggattgtggggttgggggtttttgtgggttgtggaatgttgtaacgttggattgtaatgacggttgtataattttataaattattaagagtgattaaattgtatttttttaataggtgagtttggtaagttttattttaataaagttgttgtcggtatacgtggagatgtttattgggaggcggttggtgcggtaatattaggaattgggaggcgtttcggtgttattatacgtaggaggagtatagattttttttttgtcgattattaggttttatacggttttttttcggttttgtttttgtcgcgtttttttgtttattagggtaattcgtagatagggttttagggtttttttatacggttttttttcggttttgtttttgtcgcgtttttttgtttatcggggtaattcgtagatagggttttagggtttttttatatagtttttggttaattttttgtatttttagtttttgtcggtcggagtttaggttttagcgtggatgttatttggaggttggtttttaggtttggttatttgttatggttttgtttattgtttgtagttttacgttcgttttttttatttgggggttaatagatagtaggatatcgtttttcgtgggagttgtcgttaggtgtagtttggtaggtttttttgagtgtgagacgtaggtatattgtttttagaagttaggtttggattcgttgtgagagtaacggcggttattgtagtattggtttcgaggtttcgggtttttgagtgtttttgtttttagtgagggttaggacggggtgacggtaggagtatcggtggggtttagttagtttagattttattatttggattgtttttagattaggtattttagaatttgatggtagtttttgagggacgtagcgggtagttaaggttatggtgatagttgtgaggagttagtacgtggagttcggttattaagttatgtggtttgtgattttcgggggggtagtaggcggagtttagcgagtgttggtagttttgaaatcgtgggtagtaggtaatatgtttagagtttgtagtcgttagcgattttagtttaaaaagaagttttaggaatagtttttttgcgtggagtagtatagtttgtgagaaatatagggtcgtcgggattgggcgtattagtttttatttttattattaattagttaggtcgaggtcggggttttagatttgtttagtttttgtattttggggaagagagttgttataattggaaggagtagggatttatttttttgtaagtatttttgttaaggagggggtattttgagaacgaggttttttgttttcgggagtttttcggggttatttttttttattttttattttcgggttcggggtcgtgggggttggtgttgtcggttgattagggtatttttttagacgggtttttttgggtcgtttttatattagttagtcgttgtcgggggattcgggtagggcggtttttcggggaagttgtggttcgattcggtttttgcggttagggaggaggcggagttttttatggtttttcggtcggcggtcgtgttgagagtcggatttggttatttttggttagtagcgggcgaagcggagtatggagggaagagataggacggtcggttgggtagagtgatatataataaaaataaatagatagagagagaaaatagagaagaaatagtatgatttatatatatagttcgggaggattttttagtatgtttagtcgtttggggtaggttgaggggatattttagtgtagggtttgcggttcgatttcggtatttatagggtttttttttcggggttttaggatatttttcggtttttaaaagttcggtattacgtttgtggtatttagagacgttttattttttggtgagaaaagagattatacgtttttgttttattatagaaggaagggttaagagaacgtttatttaaaggtaggtaggggaggtagtagagggcgtagggagttgttgtaggttaggttggatgaagatttggggggtcgttttatatagttgtttatatgttattttggagatttttagaaggacgggagttcgattatgttttgtgtatttatagagttaggtttcgagaaataaggattttgtgaggttatggttgagggcgggggtcggtttttggggttttttttttagaggggcgagagttatttttgttgggaggtttgggagaggtataggttgtttagggtttttgatacgcggtttatttgtgtttttgggaaggttattttattttttttggttgaggagaaattaaatatagttgagaacgttaattttgagacgggaggattttgttcgtgtaggtagttgttttttttagagttcgatatatttttttttttttgttaagattggggttaagatggcgtttcggtaggttggtcggttgtgggttgattagtagtttttgttgttatatacgttatagttttttttttagtttttgattaagtttttgggatatatagttagcgttagggtagagtttaggaggaaagggttaagtaagtgttaaagttgtcgtgcgtgggggattatttgagtttaagagtttgagattagtttgggtaatatagtgagattttgtttttatagaaaattaaatattattcgggtgtggtggtgtgtatttgtagatttagttatttaggaggttgacgtgggaggatggcgtgagtattatagttgtattttagtttgggagatagagttaaaaaaaaaaaaagtattaaagaatatattttttggagtttagggaggtttgggggtagttttaggtgagcgggttggggggggtgggggtgtagttttagtttttttttcgcgacgatggggagtagtagagggtagggatgtggggggtttttttagttagtgttttgatattcgggaggggtttgtagttttgaggttataggggttgagtttagcgaggtacgagtatttgggatcgtatagtagacgcgttagtttttttttggtttttttttatagttttggggatagaagttttaagggtaggggttgagggggtgagatagagaattttggatttttttttttttgaggtttggggtagaagtcgtcgagtttttcgtgtggtgataacgttcgtttgaattattttattcggtacgagggttcgttttttttgaaggtgttggggtcgtgggagggttgaagtattgcgggttttgtattttggagattttgttattttgtggtggtttaggtttgtttcgtaggtagaacggttataggatatacggggttagtgtggggtgcggattagagtttagttttaagtttggtttagttcgtaagttaataatggtttttatatttttaaatggttggaaaaaaattaaaaaaaaaaataatattttgtgagaggtgggagttttatgaaatttaggtttcggggttagtagggtatagtttggtttattcgtttgtaggcgtttttttatagggattattttgtatttatatttgttttcgaaggggtatttggcggttacgtcggagagcgtcgcgtagtgtggacggggttacgggagtcgtggcggattttttggtatttacgtaagataggtggaaaggaatagataaaataagttttggcgacgtgttttgtgtgattcgaggtatttgagatatcgttgcgttcgtgtgaagcgaacgtaaaatatgacggagatatttaggattcgttttttaggtcgggtttttggacgtgttatattataggttttgtagttattagtgttggcggtttttataaggggtagcgtttaaatatgtaggacgtaggcgaggtttacggggtttcgaatgttatacggaagtaaggtcgggagtttagtacgtacggagtaggttcgttagtagggagtttacgtattaatttagggtttttcgcgtggttacgttagacgtcggaattatttaaacggtttttgcgttttttagtttaggttacgtaggagttttttacgggagacgggttgggtattttcgatattttttttttgtagttaaattttgagcgggttagggcggggtagggtttgggtgggagcggcgattagcggaggtgttacgggatagaagttgtttgtattgggttttgagttggtttggttttgataggagttttgttcgttttgtgtgaggattgtatatttgttagggttaattttagttttttcgttatttatttatttacgtatttatttacgtggtatttggggttacgcgtgtcgttagaaatataggtttttattaggtttcgtttgttttttattgatgtttttaggtttaaggtagaagtggtgtttagttgtatttagggtaggaagcgagttgtttattagttttttgtttttttgcgtttatttagaaaattttttttgagttggagttagttttaggtaattgattttgtgggttttatttggataggagggaggtttgttttaggagagtagggatagtatagttttttttcgtgggtgttcggaagagaagagaggattttgtagagaaaagtaaacgtttttgttatagaggttggatagttggttttgttaagtttttttcggggtttttttagtatacgttaggggatttttagagatggtatcgttgaatcgtttcgattcgttgttagaggagttaagagtttcgtgaggggtgtcgggggttttgttttggttggcgaggtttattaaggagtaagagttttcgggatatagttgttagttacgtgttaatttgagggttttatcgtaagggtgattgtgggaaattggtatcgatgtttttttcgaaatttattttgttggttttttcgagtgtagttgtgggttttgggtttttttgtgtttcgtttatttatgatggatagatgttagtataggatgagtagttacggaaaaggtttttaggttaggtgtagtggtttacgtttgtaattttagtattgtgggaggtcgaggtgggtggattacgaggttaggagtttaagattagtttgcgtaagatggagaaattttgtttttattaaaaatatataaaaaattagttgggcgtggtggcgggcgtttgtaattttagttatttgggaggttgaggtaggagaatggtttgaattcgggaggcggaggttgtagtgagtcgagatcgcgttattgtattttagtcggggcgatagagcgagatttcgttttaaaaaaaaaaaaaataggtttttagttcgcgtttttttagagggagggaattgtatttaggaggaagatttcgatgggagggttttaggaaagaggagtaagaagtggtgggaaggagggagggtagtattagtagttatttttagggatagcgtttagttagggttgattgtatttcggtcgtgggtgttggtttcggttagatttcggtaggggggttattatgtttagggttattgaggatagtagggatagggtttgttgcggttagttagaggtttttgggaggaacgtttatttgttatttttaggttcggtttattttagggtttgggtatacgtgaattatttagtgtagtggtttcgaggacgtaggttaggttagttcgtggtttttattttggttttttgtttgaataatcgggggggggggggggcgtgtaggggtattgttattaaggagtgtgtttaggttaggtcgagggatagtagggtgaggttttcgtagagtatgtcgaattttgatttttgattttagggatatgttttgggtcgttgttgtttttgtagggtttgtcgtcggttaagtatttgtgttgttttcgtgagttgtatgtgtttttcgggtttttgttgtgggttaggttgttttaggtgttcgcgaatgggaattagtaggagtcgtgattatagggttgatttttagggcggcgttttaagagtggtcgtgatttatgattgttatagagttaggttgtagttacgttcgtttttgggttttttggaggggtagggtgcggagggtttcgggttgtgtggatttatgtttgatttttataagtttaattgtgtagtttttcgttttttttgggagtcgatgttttagttttaaacggggcggtggtttagatttagttttagagaattgtagaggtgaggtcgttattgttttgtggggataagtggttaatgagtagggttaattggtcggtttttgttttgtatgttatatatatatttcgtgagggtagtaaggagtatttagttaggggacgtgtacgagaagggttaggatgattatattgttcggggtttagtatagggttgagtttcggaggtgattattgtcgtttcgttttatttgcggttattgaggtttgttgggggtttttggtgttggttttgatagtttattcgtggtaggatagggtttcgaggtgtttttcggtaggtggtgggtttagtgggggtgattcgtggggacggaacgtatgtttttgaggttttagtggatgtaggtaaaggtatttttcggggttagcgtttttatttggggagttgggagtttatatgggagtagggttggtatagcgatttttagttttgcgcgggcggtatttatagttgtgtttatttcgtatatattttttattgtttcgttaattaattatgtatacggttgtattttcgagtttttttttgtttcgtaggtgatataggcgtgttttatttatatagtatttgtttttgggttttatattttcgttaattttttatagagttattttgttattatgggaattatagcgattttaataaggatgtttcggtgttatttttgttcgagttgggggtgtggggggtagtagatggaaagcgggggtttttgtgtttaggtagttggtggtttggttttgttttacggtaattttattgcgttttaaaattgtatttattagattagaggttgttggtttaggtaggaaataagagttagttattatcgggacgaagtttagtcggtgtttataatttgaagataggtaattttgtttttgtttttattgacgttaaggtttttgtggaggagatgattttaaggataggaagtttttgtatgagtcgggtgggagggttgaggatagggttttttatcgtttttataagaaataaggttagggtttcgttttgggggaggacgtggatttcgatcgttcgttttaaatgataattggtaggatagtattttttagaaataggtgtaggtcgttttttagggattaggtatttttttggttgaggatagcggtgggggtcgtgtataggttttttattagttttagttttagcgttgtcgtggggatggggagttttatttgggggtcggggttatagtataggggaggtttttaaagggataaatatttttgtcgggatttcgggtcgtttttatcgtcgttttttacgataggattacggtttaaacggttgggagaacgaggttttttagggtaggtagggttgtcggtttttaggggttttgtgaattaagggtttcgagaggttttttagtcgtgggtattttaattttgttgttttataaatagttttgtagcgtaagtaaatttataaacgagtcgtagggtttgggaataaatttatttgaagttgtagtaagtttttaggttttttttgtgtcgcgtttgggttgttgtttagaaagggaggtatttaattaggtattttagtttttattaggaggattttgattttggaatatagagtttcgtttttagttttttttgtaggagttagagtttcgggaaattagtttcgggagatttttcgttttagaagttgttcgagtttttgtttttgggtgtttgttcgagcgttaaaggtagttcggggagtagtaggggtttagtaggttttttattattttggtttaaggtttttgatttgtttagtgcggttaattttcggttagttaggatcgtagatagggttatttaagattttgttcggattttttacggttcgattttgttataaggagtaggtcgtgggtaagagtttatgagcggggttgtagagtagtattagttagggagggcggtcgagttttttaggtattgttagggaaaggtgtttagtttgggtaggtataggtatatagttaggtggttatttagattttttcggattttagttcgagtgttattcggttattatagttgttagtagggcggttattgtttcgagttaggcggttttgtttttttaaggttatgttttttatggcggatttattgcggtgggtaggatgtttacgtttttcgttttgttttttttgggttttgtgtagggtttattatggattttttatttagttattatttttttttttgttggttttaaattttttattttattttttgagatagagtttcgttttgttatttaggttggggtgtagtggtgtaattttagtttattgtagttttcgttttttaggtttaagttatttttttgttttagttttttaagtagttcggattataggcgttcgttatcgtgtttagttaatttttgtatttttagtaaagacgaggttttattatgttggttaggttggtttcgaattttagattttaggtgatttattcgtttcggttttttttagtgttgggattttaggtatgagttattatgttcggttttttatttttttttgtgattagtatgaggatggtgtgtaggtgtgtttagtggtataggtattatttgttttttttttttttttttttgatagagtttcgttttgttgtttaggttggagtgtagtggtgtgatttcggtttattgtaagttttattttttgggtttacgttatttttttgttttagtttttcgagtagttgggattataggcgtttgttattaggttcggttaatttttttgtatttttagtagagatggagttttatcgtgttagttaggatggttttaattttttgattttaggtgatttattcgttttgattttttaaagtgttgggattataggcgtgagttatagcggttggttttttttttttttttgagatagggtattattttgttatttaggttggagtgtagtggtgttatttcgatttattgtaatttttgtttttcgggtttaagtaattttagtgttttagttttttaaatatttgggattataggtatatattattacgtttagttaatttttgtatttttagtagagatgggggtttcgttacgttggttatgttggtttttattttttgattttatgtgatttatttattttggttttttaaagtgttaggattatacgtatgagttattgagtttaatcgaattttattttttttttttttttttttttttgagacggagtatagttttgtcgtttaggttggagtgtagtggtgttatttcggttaattgtaattttcgttttttaggtttaagtaattttatagttttagttttttgagtatttgggattataggtatatattattatatttagttaatttttttatttttagtagagatggggtttcgttattttggttaggttggtttcgaatttttgattttaggtaatttatttgtttcggtttttgaaagggttgggattataggtgttagttatcgtatttagtttcgatttttatttttaataggaaaaaaggattagataagtattcgtggtttttggtatttttttatttttttgtttgttatgtggtggtagaagtagttttggtttgggtagttcggtgattttattggtggttaagtagaagtttttgggatatagggggtatttgttattttagagaaggggacgggggttttgggagtcgtgtggttttgggtatttgttattttagagaaggagacggaggttttgggagtcgtgtggttttgggggtatttgttattttagagagggagacggaggttttgggagtcgtgtggttttgggggtatttgttattttagagaaggagacgggggttttgggagtcgtgtggttttaatttagaggaggtttcgtggtatttttttttttattagttttagtttttttgtagttatttttttaggaggggtaggaattttagaaagttttaaaatttattgttttttttattataggggatagggaggtggggggtagggagtggggattaggtaggggtagaaggtgtaagaggtttaatttgtttgggggattttatttataaagggtagaggttgggtgtggtggcgtttatttgtagttttagtatttgggaggttgaggtaggaagattatttgagtttaggagtttgaggttgtagcgagttatgattgtaattgtattttagcgtgggtaatagagtacgattttggtttaaaaaaataaaatttaaaaaatgttaaaataaagggtaattttttgaagagaagtgaggggaaggttatgaggaggaatttttttattagcggagtaagttttttttatagaggagtagacgttgtagttattgtgatatttaaaaagtagcgatggttttgcgtttttttgatatttcgtttaggatcgttagggaggcggggatggtaatttttgaagtttttttttgattttagggaatttgataaatcgttgtatttggaggttaggatggcgaggttgatgtttatgattcgacgggatttatgggtttattttggtgttttggatgagttttggggagggcggttatattgttggttttttatgtagtatttaggtaggttttttagagtgtgtaaagtaatagtttgacgtagtttattttggggggtttacggggtttttgttttgggttaggatgtttttatttttttatagattttatttcgtgtattttgtgggtttagtagtagtttttgttttagtggtataatgtggttgtttatagattttacgtttagatatttttttgggttacgtatcgggaggtttttatttagttgtgtgtgatttatatagtgatagggtgtggttgaacgggtttaggtttagttttaatttatagtttttttgtagcgagatatatatgtaaagattataggttagtaagtttgtttttttagatttagaaataggtcgagtttaggtgtggtcgtgtttacgttataggggttgttgtgttatttttttggagtacgtaggagtttttttgggttgttagaatttaggtatttagaattgtttgtggtgagggttaattttaggtgtttattgatcgtttgttttgcgtacggttgtatagcgttagatattaggtttattaagaaatagaaacggattttgttttcggcgttatatttagtagggagatagggcggttttaagtgtaagtgttgtaggtagattttatagtggggagttagggattagttatagggttatatgagaatcgtatagattttagcgttttttttagcgtggggtatgagaggttagtggttttatatagttgaggtatagtttggtggtgagaaaatttatatttatatcgagtgggtacgagggatgcggaagggttttaggtagagaataagttttattgggtttttgggtatttttgttgtgttaggggttagagggtaggattagagggatagagtaggaaaataggagagtaaagcgtacgaggtagttttcgggttgggggttttttttttttgtgttttatgaggaaattatttaagtttatttttcgtgttttttgttattttagttttacggtttagggtcgagtggttatttaggatagatatagatttgataagttattagtttttttgggtttttgttattgttttttaaagattttaagttgttttgtttaatgatgtcgtttttttttttagtatttgtttacgtttgttgttatgagtagaggtattatatcgcgggttagagggttggattaggggtaattcggttattaacggtcgagttttttattgagcggtttaggtttatgaataatatttgtggtttcggaggatttttcgggtagtagaatttttttttttaattgtttcgtgtgaattggtggaattagtaggagggagagattaggcgtttagtttttttcggttttttttttgttatgaatagttgtttttagtttcggttttttatttgtggtattggggttatcggagtgttgtttaaggttagggtaagaagtaagtgaggggtgttcggagagagagttagtagggtttgaggttgttatatagatgtagtattataggggattagttattttttgtttttagagattacggtttgtggaggtttagataagaggttttgcgtagttatgtagttattgagtttcgggtttttttggggatttagaggttattggtttttttgttaattaaggagttttggagagttttagatatagatagaagtaggaaaaagaggggtgtttttttcgtaagtagaaggatttcggaggaggtaaggtatatttaatttaaggttaggttaagttggttttttgtaggatttgttttttttagataggttagaaaaataattttttttgttttattttatagttgagaagttatttagaatcggaagggagaattatttttatatttttgtttagttttagattttggaaacgcggaggtaattacggggtatttttatattgaattgtgatttacgttttcgtattttttagatttgggtagaggaagagattcgggtttttcgaaggagaagtatataattttttagtatttaacggagttttagttttttttattggttttatatatttaggtttggttttaggttttgggttttattattgtttttcgggttttgttatttgtagttcggtaataaattttagagtagtaagggggtttcgagagttcgttcggttagggttagttgattatataagagttttttcggttaggattagaggggttttttttgtagttagcgggaggatagtagatttgtaattttttagttggtgtcgtagtagttttagaggaatacggaagagaatattggtatggttggtatagacggggttttcgttagtttttttacgttaggtggtcgtttttaggtcgttttttaagtgaggggagtgatgttcgtattaagtataatatttttaaggcggttaggatcgtacgatgggttcggatataagggtatttaagggtaggtagggtcgaggtcgttttcggtgtgcgcggttttcggggttggttttaagtgatttatatggtttaggtttttgtcgatttttcgtttttttttgggtttttttgcgaagtatcgtttagttttggtttttattagtttggaggcgttagcgggcggcgggttgattttatttcgggggttttgtcgtttttgttttggttcggagttcggcgcgttcggttttcgaggttttttgcgtttcgtcgagttcgcgtttttcgtcgtttttcgggttcgcgtttttcgttcggggttttcggttgggcgttcggtcgggttcggtcgacgggatttatttttatagttcggcggcgtcgtttcgttttcgcggttcgggtagcgcggtttcggttttcgggttcgttcgttttcgtcggtcgatttataatttttgttttcggagagcggcggggtttttttcgtcgtcggtcgcgttgttcggacggtttttcgttttttagtcgcggggcgtttcgattcggtttcggtttcggtttttgttcgcgttcggcgttcgttttacgttgttttcgtagcgtagcgttcggttcgggtttcgcggttacggcgcgttcggggcgtacgcggcgttgtgaatcgcgcgttcggattacggtttttatagggttgcgcggcgtcgacggggcggaagttcggggcggtgtttgcgcgaggtaggtcgggagttgtagttttcgggtggcgtttttttagttcgtcgatcgttcgggttattttttttgttttcgttgttggagacggtcgggttcgaggtttcggttttcgggaggcgtcgcgttttaggattattagggagtggggcggttcgaggaggagttggaattataatttttagagggttttgcgaggggtacggaggggcggggtttgtagtcgcggcgtttgcgtattagcggcgttatagacgcgtggggttcgcggggagtcgggttggggtcgttcgtgtttcgcggggttttgggcggtcgttcgatcgaggatttacgatttcgtttcgatttcgtcgtgttcgcgagattcggagattttttcgcgttttttaggatcgtttttttcgcgacgttgcgtgttgtgtttggttttggcggttaagagcggcggtggtaaggggatcgttttggttcgagacgcggtttggtttcgtagcgtcgtttgggtatagtttttttaggttttttcgttttcggtcgcggagggacgttattaaacggttacgtcgggtttaattgggacgcggtttacggcgtttaattagggtttgggggagggaagtcggggcgatttttgggtttttttaggatttttgcgtaggttttatttttttttcggaggtttttttttcgttgttttgaggttatttttttgttagtagttgttgggtcggttttcgggagaatgttttggcgttaagtttattaggttgtagggcgggacgcgagtgttgagggtagttagattttcgtttttaggtgtatttgaggagtttgagaaggtagtggttttgcgggagagggagatataggagtagggttggttcgtcgagatttcggagagacggttgtgggtcgattttgtggcgagatttataagtgggaggttgggtgacgattgtttttgggttagaaaatttaagttagttttagtaagatttataaggttagggttagtgttttttagaggatatttatgttttaggaaagttaaggatgggttttcgttatgttgagatgtcgtagtaggga

SEQ ID NO: 151 - DNA, 17265 bp, Artificial Sequence
  chemically treated genomic DNA (Homo sapiens)
gtaggcggattacgaggttaggagttcgagattagttttattaatatgttgaaatttcgtttttattaaaaatataaaaattagttaggtatggtggtatacgtttgtaattttagttatttaggaggttgaggtaggataattttttgaattcgggaggcggaggttgtagtgagtcgagatcgtattattgtattttagtttgggtgatagaatggaatgagattttgttttaaaaaaaaaaaaaaaaaaaaagaagttttagatttcggttgtgttggttgtaaaaggagagatttagtaagtgggggttgtgtcgtagattgttatttataatggacgggttattgagtaggttcggttaattgggcgttttttcgttggagggttagtatattagattgtaggtggcgcgggttagtaaggtattaggggatgtgttatatatatagtttattttcgtttagttacgtacggatattttgggttttcgagtaaatttgtttttacgtggtgtgattatatggagttatagatatttagtaaggatacgtagttcgtatattttcggtattttagatatagtgatttgtattagggttcgaggtttttttagggaatttattttttagaattatttagaaataagttattttttatttgtttagtaaaggtttgttgagaggtgtatagtgtttggagtttaagttgcgttaaggcggtaggatttttagtttagtttaggatttttagtagagtttttattttagcgtggaggtttgagaacgtgaggaaggagttgtttagtacggacgagtttaggtagttgtcgatgtttagtatttattgttcggtaggtgtggggtttaggtttttagttatttgtaggacgacggtagtggttagcgggcggtagtttagatttgtttaggatagggatgagaagttatttttttagtagataggatagagttcggtgttatttaatagaatgttttagaatgttggatatatgggatatttgtatcgttcgtgatggtagtttttcgcgatatgtgttattgaatatttgatagtagattggtgtagttaaggaatagagttttgaattttattttttttttttttttaagatggagtttcgttttgttatttaggtaggagtgtattggcgtaattttagtttattgtaatttttatttttcgcgtttaggcgattgttttggtttagttttttgagtagttgggattataggtgtttgttacgatgtttagttaattttttgtatttttagtagagacggggttttattgtgttggttaggttggttttggaatttttgattttaagtgatttgttcgttttcgttttttaaagtgttgggattataggtgtgagttattacgttcggttatcgttttattttaattaattttaatacgagtagttatatgtggtttttggtttttgttacggattcgggagtaattttttttggtcgcggtttatgcgttttttttgtgtgttgttggggttagtttgtatgtaattttttgaggattttacgtgtgtatttttaaggggtgcggtttttcgttttcgtatgaatgggaagagtttttatttgttgtatttttggaaagagtttgtgaaggattggtgttaatttttttttaattgtttagaaaaattttatcgtgaaggttttgagtttaagtttttttttgtgggatttttttttttttttttttggagatggagttttgttttattgtttaggatggagtgtagtggcgtaatttcggtttattgtaagtttcgttttttgggtttatgttatttttttgttttagtttttcgagtagttgggattataggcgttcgttattatgtttagttaagtttttgtatttgtagtagagatagggttttattgtgttggttaggttggtttcgaatttttgattttaattgatttgttcgtttcggttttttaaagtgttgggattataggcgtgagttatcgtgtttggttttttttaatgttttatatagatggggttttgttatgttgtttaggttggttttaaatttttggatttagattcgtttatttcggttttttgaagtgttgggattataggcgtgagttattatattcggttcggttattgggaggtttttaagggattaattcggtttttttatttgttatagatgtattgagatttttttttggagtgtatttcggaagcgtgtatagtcgcgtgtttgttttttttgagttatttggcgtgttgttgtgtagttgttcgtggcgtttgtttagcgaagtgttttcgtttttttacgattttggtttttgagttttttttttttttttttggttagtttagttaaggttgtttaagtgtgttgatttttttcgagtagtttttggtggacgtttttttttttggttgtagtattggaaagtggcggttttgggtatggtgtcgaggtttaggttttatttttagtattttcgggtttttagttttagtttattttgtttcgggatattcggaagagaaagaggatggttaggtagacgggatagataattacgttggatattaggttaatagcgattgtgtcgacgtttagcgggtttagtttggatatatgtttcgtgttgtgtggaggagaggaggttatataggtgaggttgaggggtaggaagggttgggtaggaagaggttgtttcgatttttacggtatttatttgtaggtagagttattaatagtttcgtattatacggcgttggcgtttaggaagaggtagatgaggagaacgtagtaggtggttttttggatgcgagtgaaatagttacgaggtggtcggttttatatggagagttagatgtgtttgttaaagaagttacgttgtagtttagttattagtaggcgtcggaagcgtaatagggttgcgtgatttagaaggtagggagggtcgtattgtaggaggttacggggtaggattattttgtttaattttttacggagtgggaatatggaacgaggttttattcgtagttagtatttttttttttattaggttttcgttggttttcgtttttatcgaaagttagttattgattaggaagaaggtgttgcgtgtcgtttgtaggtttttgacgatgatgtgttgtaggaattaggtagggttgagttttgtagaggcgcgggagggaggttaggttcgtagggcgttttaatgcgggggtagaggggtagagtttggtagggttcgtatagatttttgttgtcgtgttatattcggattttttatacgttatttaggttgtgcggggtggcgattcggaagatgtttagattgttgcggtggaaggttttgtcgtcgtttaggtgtcggtggtcgtttcggttgtttattttatatagtatgatgtttacgtgggtcgtggtatttggagggtaagagggaggggtgggaggttcggtttgttgtttaatacgtgtggtattttaggtaagttattttagttttggttttcgcgtatttaaggagttatataggtagtttcggttttgtacggttttgttatatacgaggagttgcggttattgtaatttgtttaataaatagtaggattttaaggatatgattaagttatacggaaagaattgtaatttgtgatatgtaaatatggttgtatacgttttagtttatattataattagtgattcgcgttgtatatttgtttacgttttagttacgttataattagtgattcgtattatatattcgttttttagtttatgtatagattgcgaagcgtgaagttgtgttatttttttttttagtgatagatttaggtgatagtattttttttttttttttttttgagatggagttttgttgtgttatttaggttggagtgtagtggcgtaattttagtttattgtaagtttcgtttttcgggtttacgttatttttttgttttagtttttcgaggagttgggattataggtgtttgttattacgtcgggttaatttttttgtattttttagtagagatagggttttatcgttagttaggatggtttcggttttttgatttcgtgatttgtttgtttcggttttttaaagtgttcggattataggtgtgagttattacgttcggtcgatagtttttaaaagtaggtaattaaaagaattgggaaatgaagatgaaagtaatacggaaataaaaaatgggaatatagttaggtgtggtggtttatatttgttattttagtattttggtaggtcgaggtaggcggattatttgaggttaggagttcgtttggttgatatggtgaaaaattaattgggtgtggtggcgtgtatttgtatttttagttatttaggagaatcgtttaaggggaatcgtttaaatttaggagttggaagttgttgtgagttaagattacgttattgtattttagtttgggtaatagagtgagatttcgtttttaaaaaaagaaaaacgaaaataaaaagggaatgttagaagggtaattttaataaaggaaaatggaggtattgaagaaatagttacggggagggtgttggtattttcgtttgagagacgagttatgtagttaggatcgcgggtggatgtatggttttttatagtggtagcgatgtttatgttatttgtggggttacgttattgtgtagaacgtgggttgtttattttgattgattggtatttatttttagttaggagttgttttagtttttagggatagtgagtgtttacgaggttatttttaggatgaatatacgagttttttatatagtattgtaaaaattgttttgttttgacgtttgcgacgagatttatttttagagggtgtaattagtatagttagtgagagtaggggaggttttgttatttcgtcgcgttttttatttgagtttcggttttagtttgttttgacgaggatttcgtatttgaagcggtttcgttgtttatagaaggggatggcgtagtttcggttggtatttaattggtttagtttgtgtaggatggcggttatgattatgtaggttattaggtatatagtatatgttagtatgacgatgtagtttatattcgttgtcggtttttgtgaagatatagtcgtcgggtttaggaggttacgtgtaagttgtgtttttttaggatagagtcgagtttatttaggtttttttcgattttgtagaggtttttaggagtatagggttatttataggaaatataaagcgtatatggtttgggggtatgaagaggttggcgtcgaaggcggtgaggtggcgggtgaggtagacggtttggcggggcgaggttttttttaggggtagtagtttttttgttcgttatattatatttttttcgttgaagtattggtatagggacgtgtataagtttacggatatttttagcgtcgattagcggaagtggttggagaggtttagacggtaattttttattgggtttttggttttgggaagggaaggggtagtggacgtgagtttaggtttcgttaggttggatgtcggagttttagagtttatattcggtttagttttttcgttgtttgtcgtttttacggggttcgtaattcgggtaatgttgatttatgatgttttgttttgttttgttaggtcggttcgtagagtttatttcggggaaatgaagaaggtgtagggtcggtggtcggtattttggagggattttgggcggatttttttgttagtcgagtagttgcgtttattgggtcggggtttcgagtgtaggtagattgttaggtagggttcgggttttttagataggtagcggtttggggtagaacgcgtaggttatacgtttgtcgggaagtttaattattcgggggatatttacgatggtttttttgagtttattttttgttacgggtttgaaaggttataggagtttttgtattagagttggtatttgttttttcgtggtttttagttttttttcggttaggtttttaatagtttatgaaatagtaaattttattagagatatttatggaagttttacgagaaacgttttttttttaagaataaggttagggggtcgcgtgtgttttattcgttgtatatatcgtttagtagcgtatagttgagttgtagatgtagtacggttatagggttgttgttgtttagggtgattatagtatcgacggaggtttggggttggattataacggagttggcggagttgcggtggtttcgggtagtttagttcgagttgttgggtatttttacggtgatggcgcgttttgaggttagtcgttcgatggggatttgggcgtcggtttgtgtttggaacgttatcgaggttattttggtggagacggtgtagttgttgatatagttaaagagaaagggattggagtttattagaaagacgagttgtattacgttattgaggttggcgggggttttgttgaaagtttaggggatggagaggtggtagttaggttttggggcgtcgttatagtatagtaggtttcgcgggttcgagcgtttgttttgggttatgattttttcgttcgttagcgttacgggtttttcgttgagtacgcgggagcgcgtgaggatgcgtatgagggtagaggttaggttgtaggtttgggacgttattattcgtaatggtgattcggtttttagttttgagcgttgcggtgttcgtacgtttgagttggttaggtggatgaggttttttgtagataggcgtgaggttagtgtagagatagggaggtagagggagggtgggggtaggtaaaaagggggagtcggagggtgggggttgggagaaagggggaatttgagggggtagagagcgaggtgtaggtagaaggaagagggaagttggagagagagtggtggagggggagggggaaggggatggggatgaggacgaagatgagggggatgatggggagagggaggaaaaaggaaggaaaagggtagagaaaagagaaaggggagaagaagaggagtagggtgaaagggaggggaaggggataagggggataagggaggggaagggggataagggaggggaaggaggataagggggataagaaagatgaggggaatggataaaaggacggggaggatcgggggggaaatggagaaaaggggagagagatggagaaaagggatggtaatagggaagggggagggggaggagaatgggaattgggggagggggataaggatgggaattgggggagggggatgaggatgggaattgggggagcgggatgaggatgggaattgggggagcgggatgaggatgggaattgggggagggggatgaggatgggaattggggggaggggagggggacgaagatgggatggggtaaaggcgaggcggttgtggggaggagggaggtagaggaaagggcggtatggggcggacgggttacgtggggcgggcgggtggcgtggggtacgggtcgcggtatttgtgatgttgaggatgttgttttcgatggcggtgggcgttacggtgttcgcggtggtttttgtttgtaggatgcgtattatggtttttagtttgtgtagcgtttgttttaggtacgagcggtatacgagttttttgttgggtttttgtgtggagttagtagtgtttagtttcgtttttggttttattttttgtatacgtttttttttttatacgggtttttatttggtttttatttttagttttgtagttggagagtttatttgattggatttttatagtttttttattaagtattttttgtggttttgtatgatttagggtttttatttggggaatacgtgatgtagtttatcgattatataaggtatttttttatatgagagaaggaggagggtagaagggagagaggagagggaagtggagaaaaggggggagaggagagggaaggagagagaagggggagaggagaggggaggggagagaaggggggagaggagggagggggaggaggggaggaaggaggaggggaggggtgaggggatggaggggttgggggaggagtggaggggtttagcgggatgaggtgaggggaaggtttaggggaggggaggaggggaagggttaggggaggggaggggttgggggaggaggtaggggttaggggaggggggagggattaggggagggaagggggaggggaggggttaggggagggaaggggaggggaggggttaggggagggaagggggaggggaggggagagtggagggtatagagtagtatttttttagtttttttttatatttgggtttttttttatattttgggtttttcgagaggtattttgcgtttatataggatagtagaatggttgaggttattgaagtaggttagagatcgaggaacgttatggtaggaaggagtttaggttggaggtttagtttttcggttaagttgttcgtttgttttggggggttgaatttagtattttggtaggtatgcggggcggggagagtatgtggggttattttattatgtattgggttagcgtagtagcgatttgttggatgttatttatagtgtggatttttagggatattagagttttcgtgatgtttttgcgtatttgggttcggcgttgtcgttcgtgtttgggttttgtcgttacgtttagggttcgttcgtattggggtaggtagggggtatagtaagttgttagtagggtaggaggtcggtaggaggttagtagatgtttacgattttcggggtgtagttacgtgttagatgttgtgtgatgtgggtattgattcgtaatattgagttgtttttttatgggtaaaatagggtaagtatatgggtttttttgggcgggggttgtattgtggaaagtagacgtcggagagggttcggtgggtgtggttgttgggagcggaacgtcggggtgttgttttagggttattgggatttatttttggggttcgggatgagtttttcgtaaagttttaggtaggggaataggttttggtttttagtacgtatgtagtagatgtgaggtttttttttaggttgtatttatttcgtttagtatagtgattagggttagcgagtattcgatgacgtgttggggatcggtttgtcgtagtagtttcgggagtatattagcggtgagttcgtgtagttagattgtgagttttattgcgttgtcgttgggttttgggagggtgatggttagagatttacgagtagaggggggtggtgagtaggtggtagtttcgggggcgtttttttacggtttggtttatttgttgagggcgattatagcggtttttagttggttttgtattattacggttaggtttatttcgaagtgtggtttgaaattcgggggtagtacggtttcgtagtcggagaggttgtttttgtagatatagaatttttcgtagtggttttggcgatagcgttgtagtagtagggcgtatattagcggggcgttagtatttttcgcgttatgttagtttgagggacggtttttacggtattacgggagggtttcgtgattttatagagtcgggggatttcgttgttttttttacgtaggtttgtatttatttatgtattcgaagtgtattttggtggtgagagcgtgtatagcgtttagtgggaagaggcggtaagagttttttagcggcgggcggttgggggatagggggatggaggcgtagtttttttttttgttagagcggtttagtatcgttagcgtgaaggtgtatttttcgtcgtttcgtagtacgtttcgtcgtagtattagttatatgtttgcgttgttcgtggatgtggtggttttatttagtattagcgttttgttgttgaacgtacgtgtagtttatcgttgtaggtagaagggatggtgagggggcgtaattttttgttttgttagttttatttttgtttgtaggtttcgttttttcggttatgggatttatttttaattcgtttatatttcgtttaatatttatttttcgtttggagtcgttgttgtaattgaggtagcggttttttaggtatacgtaggagttgcggtttatttcgtatacggtttgtgttttgtaggatatatattttaaggatataatgggtattcggttattgcggattagtatttggcgtgggagtggggttatttttaatataggtttatttggtttgttggaaggtttgggggattcgtggaggatgttgtttttaaattttaggttttttaggggtttggttattgtcggtgagtttatttttttttaggatatttattcggtttgttattttttaatttgggcggcggaagggtatatatagggtagaggatattggggtgtgcgttttggtgtattggagttagttggattttggtaggaggtaggtaatgtttattgagggtttttggggggatgcgtgtgggaatagacgtatgtgtgggtgtgaggatcgtagttgttacgtaggtttgatttatagatttttgtagtttttagttagggtttgggttaggaggttgagtcgggatggaatttgtttttatattttttttttagacgatttttttgggtagatttttaattaggttagttgaggaaagtagggattggggaatagatatttattttggggtattagtaggttttagttagggaggcgtatacgtttatagagggtagggaggcgtatacgtttataggtatttgttgcgttcggttttcgaaggtattagatgttagtaaggttaggacgtatttatttgtggggataggtttaagtggggtagtcgcggtatttttatttgttttttattcgttcggtagaagtttttcgtttgaggagttcggggtgaacggttgtatttgcggtttagttttaagggttttaggtttttaagttacgtgcgggacggagtataggtgtagtagtattgagggttgtttggtgaggacggtatcgtttttaagtgtagttgtattcggggtagtagagtagtaagagttaggtcgcggtggggggtagtttagggggtttagtttttttgtttattttttttacgtttggttttttttttattttagtaggggtttaagttattagtttaggtgaggttatagtgagggttgttggggaggaagcggggtagtttgattgggggattgggggggtttcgtgtttagagtttgaaaggtagtggtttttttatttttttattttttatttggggtagcgtaggtgtgggtgatattgtgttttattagtatttgggttatcgaggggtttggaatcgggaaggattcgttgtacggaggttggaattggtggagggtttgttttttatttttaaaggtttatttgtcggggcggtgggaggtagtgagtgaatcgggataggggtgcgtagtggcggggtataggtgcgcggtggcggggtagggggtgtttgggatttagtcgaggttttattttgtagttacgtttcgggtttttatttagggtttattcggttgtgttgaggtttttttcggttttcgtgtagttttagggtttttgtgtatttagtattttttaatagatagggaaatcgaggtttagaaaagtaattttttgatgtggggtttttcggttgaggttggagtcgggataagagtttggtgttcggataagagtttggtgtttattttaaatcggtttttgagttatttataggaaggttatttttacggtcgagtttattagtacgttcgtcgttagtgttagcgtggtattgggggatagtacggttggtattgtagagattcgtaggttttgtattttgtttattcgttttacggtgatgttgtagtttacggtgacgttgtttacgtggttggaggtcgttagttgtagggataggtattagtgggtttaggtggtaggtgagaggtttgttttgtttggcgtttttttttttatttattatagttatggtagcgttttcgggtagtatgaagtagagtagaaggtagaggtgaaggtggagttcgttttcgtttcgttttatttttttttttttttattttcgtttatttattgagagtttgaagatcgtcgcgttttgataaatgatattgaagattacgttttggaaggttagggattgtttgtcgttgatggtttatcggaagattatgttcgagtcggtttttattacggggttgtatttttgcggggggattggtgttagtttgggttttgtggaggattttgtttttagtttgtcgttttttggatatatttttcgtcgggttggagagttttacgcggggtatagaggagaggaggtgttcggggttttgtatgttatgagagttaagttcgggttgggatattgattgttcggttttttagttagttatgtagtattattaatgttttaatttttttgtgttttagtttttttatttgtaaagtaaatttagtattagttataaagagtttatttttttttgagtttttttagattttttcggggtttttgttttagttttttagttagagagttcggagtagtgaggggaggtatacgggttttatagggatagtatttatattggtttatagaatttaggataggttgtataggttacgttatttttgatggttttttttaaggtttttggtgaaggggtaggtattcgtaagatggaatagttttgttttttatgtatttagtatggtggtattgcgggtagttcgtagttttttattaggggttcggattttattttaaaagttatttgttttagttaggcgagaatatagtagagggcgtgagagatttacggggattcgtgtgaggttagggagcggagttttaaatttatttcgtgaaatgagacggtggaatgagttagcggagtcgttgttagagtcgtgattttttaggaatttaaagtttattaggtagtttgaggagttagttagtaggatttgttcggggtcgacgtttttagtaattgggttgttgtttttattgggaagttaggttttaagttttgtgtgagtattttgtttgtaggtatttgtttgggggttggtggtggagtttcggttatatttattattgggattttttgtagtatacgggtttcggggttgggcgtggcgcggaggttatagatgggttttttcgtcgttattcgtaggttgaggttggttcggttggcgttgttttttattataacgtttattacgtgtttttttttatcgagttacggtagtgttattattgagaatagggtattattggttttttaggggtagtcgggtacgaaggtggttattagggtagggtaggtatttttaaagcgggcgttgatattgtttttaggttagcgagtcgtggtcgtggcgttggtattagagtttatttggagtatcgaggttgagtcgttggtgggtacgtagaggcggtcgtcgcggggggtagggtagatgattcgtagtttagttattggggagattacgttaaagttgtaggataggttgtgtttggatacgttattgtttatttttgttcggattttatagcgtttaggtagtcgtagtttagggttgggttttaggtttagtagtacggtgagttgtttcgtggttgtaagtagtcgtagggtataggtagggtaggtttaagtgttttttagttgggttggtaagtggggtagttatgacgaggcgttggcggagaggtacggggtttggggattagggtggtcgggagtcggcgagtagtgtaggagggcgttagggttagcgtcgtgttgtaagttaacgaggttattagggagtatgaggatattttggttgtggagggtgatttgtggagagggaggtagggttgtattacgtttttacggttatggttcgtggatttttgtacgacggatgagggtggatacgtagggtttttcgtttcgttagttatattttagggagtttttttatagtgttcgtgataaggataggtaggatagttgtagatagggggatatacggggagaggatataggttaagatttggtagataggaaggagcggttgtgttgggagagaggaagaggaggtatagttcgtgttaagggtttaggcgagagttttttttattgggagaggggtaagggtattgtagaggtcggaggttggaggtcggaggtcggaggttagaggtggtaaggacgtgggaggggtttgtaggttgggtgtgtttgttgcgtagatttagattttgggtagtagataggaaggtggtttgaggagatgtagggaatagatttaggttagggttatatatcgagtattgcgcggggggtttcgcgggaacggagaagaggaattttttttatagcgtatagggggtttcgagtagttttggttttgacgtgtagttattggcgtaggtttgggggtggtaggaggcgtttagcggtaagtagatgttggttttagggtattagcgtttttttggtatgtacgcggggattagttgggttttgttgttcggggatttgtttttaggttcgttgtcgtttttcggggtttttgcgaggaggggagggtgttggggtttttattcgtttacgggttatcgttagagatgtttaattgtttgtattagcgagtttggttttgttgtgaggataggttttttcgttcgggtagtatttttagtttagtgttgcgtttttgttttcggttagttgattgatttaggtcggtttttaggtaggttttattcgatttatttttaggatatttggaatgagttggtgtttttggaatttttgttttgtttatttaagattgggaattattttgatggttataggattagtagacgtgagagtttagagaggttatttcgagttttgcggcgtttattattttagagttttatttgttgtgttgaggagtcggtatatttgtagtcgtagttgggcgggtcgtcggagtttttgggttttaaattcggtcgtggtgaggaaggttttacggtttagacgtaggttcgggaatattatgatttggtgggtagggggtcgttttagttttatagattttattttagtttgaagtttagattttttttattcgaatttcgtaggaagaggggagggaaggagagcgagttatcggatttttataggtttggtttttgtcgttcgagaggaagatttcgatggaaattgtttatggggggtaggatttttgatttgttttttaggaataatttatttatatttagagaaaaggtttgggggtaatgtgagtaaacgtttttttttttgtattttggatttttttaattatttttattgggtataagtaatattaaggtttttaagttttttggcgagatttatagtgggtagggtaggcgaggtttttaggggtaggtaggagggtaggttatagaacgtggggggtcgattatttttacgggttcgtgcggggttgagaggtcgttttgtcgtgttagaggtattaggggtttttataggtttttattgggcgtttttacgaggaggttttcggtattttgtattgggtttggggtggtaagtgtatagtgaggcgtcgggttagggtttaggatattaggacgaatagattggggatcgagtcgttcgagaatttttttattagttttttttttttagtttaggttttatcgcgggcgttcggtaggtttttaattatagttagcgttttaggtttttgtttggtttttcgtatatttttaggtcgtagttcgtagacgtagttgtgcggcgttgagtataggtcggtgttatattattcggtgggttcgagtcggacgtagtgttcggttgtggttgggtgtggtttttcgggtagttagttttggtagttttttaggttgaaggtttcgttttgcggcgttgggtttatttttattttttgtatagtcgagaagtcgatttatatgtttaggtttttgggggcgggtgtgggatggtagggggtttagggtatttttttatttttttatttttatagtagttcgttgggagtttcgttattgtttttttttttagatggggaaattgaggtttagagttcggagagtagggtttattagtttaggtttatagtagtatttatttacggggtttgtgggtatcggtagggattttcgtgtaggttatttttcgtatggcgtgtttaggagtgttcggaggttgtttttagttcgcgtttatttttgtatttgtagagttgataggaacggttttatcggtcggcgttatttgtttattagggtcggtttagtttttatttttttttttttgagattttttagtcgtaggttttgttttattgttttagagattttttaatttatggtttttcggggggtggggtaggtatttggtgattcgggagattaggaagcgttgtacggcgggattgtttattattgttagggtggtttcggtttaggttcgatattgtttttgcgtttgtagttaggtcgttttttttattattaggcggtagtagtgtttattgttagagaagattttcgtgttcgaggggtagagcgggtgtatcgttggagattagtgggaacgagggtgttaacggttagtgtgggtttaagacgggggtattaggttttgttttatttggatggttttggggaggaaggggagtgggtagtagatatttatttcgggtcggtttttcgtttagggttacgatgttgtaggcggtttttaggtttgaattatcgcggttttggatgttgaggtcgaggttttcgttattttgtatcgaggacgggtatacgagttttagggcggtaggtgtcgtttttatttgtacgtttgtttttagtagggttgagtcggtttttagggttagtacggtcgttacgtgatagcgtttaggtagtatatagcgatgcgaggtagtcggtttagcggtatttatttcgggggagtcgttttcgaagttttagcgtgtggtagtgatagggagcggggtagcgatgtggaaggttgttagttggtcggaggttaggggttcgtggggttttattagggtggtttttggggaggtagggaagacgtgttggaggagggtggggtttttataggtgggggtaggaggcggcggggggtcggagtag

SEQ ID NO: 152 - DNA, 17265 bp, Artificial Sequence
  chemically treated genomic DNA (Homo sapiens)
ttgtttcggtttttcgtcgttttttgtttttatttgtaggggttttatttttttttagtacgttttttttgtttttttaggggttattttggtggggttttacggatttttggttttcggttagttagtagttttttatatcgttgtttcgttttttgttattgttatacgttgggatttcggagacggttttttcgaggtggatgtcgttgggtcggttgtttcgtatcgttatgtgttgtttgggcgttattacgtgacggtcgtgttggttttggggatcggtttagttttgttggggatagacgtgtaggtggaagcggtatttgtcgttttggagttcgtgtgttcgttttcggtgtagagtgacgagagtttcgattttagtatttagaatcgcggtggtttaggtttggaggtcgtttatagtatcgtggttttgggcgaggagtcggttcgaggtgagtgtttgttgtttatttttttttttttttagggttatttagatggggtagagtttggtattttcgttttgggtttatattgatcgttgatattttcgtttttattggtttttagcggtgtattcgttttgtttttcggatacggagattttttttggtaatgggtattgttatcgtttggtggtggagaaggcggtttggttgtaggcgtaggagtagtgtcgggtttgggtcggggttattttggtaatggtggatagtttcgtcgtgtagcgttttttggtttttcgggttattaggtgtttgttttatttttcgaggggttataggttgggagatttttgaagtagtggggtagagtttgcggttggggagttttaggaggagggaggtgggagttgggtcggttttggtgagtaggtggcgtcggtcggtggggtcgtttttgttagttttgtagatgtagaggtggacgcgagttgggggtagttttcggatatttttgggtacgttatacgggaggtggtttgtacggggatttttgtcggtgtttataggtttcgtgggtgggtgttgttgtgagtttgggttggtgggttttgtttttcgggttttgagttttagtttttttatttggaaagggggatagtgacggggtttttagcgggttgttgtgagggtgggaggatggaggagtgttttgagttttttgttattttatattcgtttttaggagtttagatatgtggatcggtttttcgattgtgtagggggtggaggtgggtttagcgtcgtagggcgaggtttttagtttggagagttgttagaattggttgttcggggagttatatttagttatagtcgagtattgcgttcggttcgggtttatcgggtggtgtaatatcgatttgtgtttagcgtcgtatagttacgtttgcgagttgcggtttggaggtgtgcgaggggttaggtaggggtttgagacgttggttgtggttaggggtttgtcgagcgttcgcggtggagtttgggttgaggaggaggggttggtgggggggttttcgggcggttcggtttttagtttgttcgttttggtgttttgggttttggttcggcgttttattgtgtatttgttattttaggtttagtgtaggatgtcgagaattttttcgtgggagcgtttagtggggatttgtagggatttttgatgtttttggtacggtaggacggttttttagtttcgtacgagttcgtggaggtagtcggttttttacgttttataatttgtttttttgtttgtttttggaggtttcgtttgttttgtttattgtgggtttcgttaaaaaatttgggggttttaatgttgtttgtgtttagtgaagatggttgggaaaatttagagtgtagagaggaaagcgtttatttatattatttttaggttttttttttgagtgtgggtgagttatttttgaaaggtaggttaggggttttgttttttatggatagtttttatcggagtttttttttcgagcgataggagttaggtttgtgggggttcgatggttcgtttttttttttttttttttttttgcgaagttcgggtggggggagtttgggttttaggttgggatggggtttgtggagttgaggcggttttttgtttattaggttatggtattttcgggtttgcgtttgagtcgtgaagttttttttattacggtcgaatttgggatttaggagtttcggcggttcgtttagttgcggttgtaggtgtatcggttttttagtatagtaggtgggattttggggtggtgggcgtcgtaggattcggggtggtttttttgagtttttacgtttgttggttttgtggttattagagtggtttttagttttaggtggatagagtaggggttttagagatattagtttattttaggtgttttgggggtggatcgggtggggtttgtttggggatcggtttgggttagttagttggtcggagatagggacgtagtattgggttgggagtgttgttcgggcggggagatttgtttttatagtaaggttaggttcgttggtgtaggtagttgggtatttttgacggtggttcgtgggcgaatgagggttttaatattttttttttttcgtagggatttcggagaacggtagcgagtttgagagtaggttttcggataataggatttagttggttttcgcgtgtatgttagggggacgttggtgttttggagttaatatttgtttgtcgttggacgttttttgttatttttaggtttgcgttaatggttgtacgttagggttagggttattcggggttttttatgcgttatggagagagtttttttttttcgttttcgcggggtttttcgcgtagtattcggtgtgtggttttgatttgggtttgttttttgtatttttttaggttatttttttgtttgttgtttagggtttgggtttgcgtagtaggtatatttagtttgtaggttttttttacgtttttgttatttttgattttcgattttcgatttttaattttcgatttttgtagtgtttttgttttttttttagtgggagaagttttcgtttgggtttttggtacgagttgtgtttttttttttttttttttagtatagtcgtttttttttgtttgttaggttttggtttgtgtttttttttcgtgtgtttttttgtttgtaattgttttgtttgtttttgttacgagtattgtggggaggttttttgaggtgtggttgacgaagcggggagttttgcgtgtttatttttattcgtcgtgtaggggtttacgggttatgatcgtgaggacgtgatgtagttttgtttttttttttataggttattttttatagttaggatgtttttatgttttttggtgatttcgttggtttgtagtacgacgttggttttggcgtttttttgtattgttcgtcggttttcggttattttggtttttaggtttcgtattttttcgttaacgtttcgttatggttgttttatttgttagtttagttggagggtatttgggtttgttttgtttgtgttttgcggttgtttgtagttacggaatagtttatcgtgttgttgggtttgaggtttaattttgggttgcggttgtttgggcgttatgaggttcgggtagaggtgggtaatggcgtgtttaggtataatttgttttgtagttttgacgtggtttttttagtggttgggttgcgggttatttattttgtttttcgcgacggtcgtttttacgtgtttattaacggtttagtttcggtgttttaggtggattttggtgttagcgttacggttacggttcgttggtttgggggtagtgttagcgttcgttttgagaatgtttgttttgttttggtggttattttcgtgttcggttgtttttgggagattaatgatattttgtttttagtggtagtattgtcgtggttcggtgagggggagtacgtgatggacgttgtggtggaaaatagcgttagtcgggttaattttagtttgcgggtgacggcggaggagtttatttgtggttttcgcgttacgtttagtttcgaggttcgtgtattgtagggagttttagtggtgagtatggtcgaggttttattattagtttttaggtaggtgtttgtagatagggtgtttatatagggtttgaggtttggttttttagtgagggtagtagtttagttattggggacgtcggtttcgggtaggttttgttggttggttttttaggttatttggtgggttttaaatttttggaaagttacggttttgatagcggtttcgttaatttattttatcgttttattttacgaaatgaatttaaaatttcgttttttgattttatacgagttttcgtgagttttttacgttttttgttgtgttttcgtttggttaaagtaagtggtttttgaggtggagttcgaatttttgatgggaaattgcgggttgttcgtagtgttattatgttgggtatatgggggatagggttgttttattttgcgggtatttgtttttttattaggggttttgggaggggttattagaaatggcgtgatttgtgtagtttgttttgggttttgtaagttagtgtaggtgttgtttttgtgaggttcgtgtgtttttttttattgtttcgagttttttggttgaggagttggggtaggagtttcgggagggtttgagaagatttagagagaggtggattttttgtagttggtattaggtttgttttatagatggggaaattgaggtatagagaggttgaggtattagtagtattatatggttggttggagagtcggatagttagtgttttagttcgggtttggtttttatggtatgtagagtttcgggtatttttttttttttgtgtttcgcgtgggattttttagttcgacgggaggtgtgtttaggaggcgataggttaagggtagagttttttatagagtttaggttgatattagttttttcgtagaggtatagtttcgtggtggaggtcggttcggatatggtttttcggtggattattaacgataagtagtttttgattttttagaacgtggtttttaatgttatttattagagcgcggcggtttttaagtttttagtaggtgggcgggagtggggaggggaggggatggggcggggcgggggcgggttttatttttatttttgttttttgttttgttttatgttgttcgaggacgttgttatggttgtggtgagtggagggagggacgttaagtagggtaggttttttatttgttatttgggtttattgatgtttgtttttgtagttgacggtttttaattacgtgagtaacgttatcgtgaattataatattatcgtggagcggatgaataggatgtagggtttgcgggtttttatagtgttagtcgtgttgttttttaatgttacgttggtattgacggcgggcgtgttggtggattcggtcgtggaggtggtttttttgtgagtgatttaggggtcggtttggggtgggtattaggtttttgttcgggtattaggtttttgtttcggttttagttttagtcgagggattttatattagggggttgtttttttgagtttcggtttttttgtttgttgggaggtattgggtgtataggagttttgaggttgtacgggagtcgggagaggttttagtatagtcgggtgggttttgaatggaggttcggggcgtgattgtagagtggagtttcggttgggttttaagtattttttgtttcgttatcgcgtatttgtgtttcgttattgcgtatttttgtttcggtttatttattgttttttatcgtttcggtaggtggatttttggggatggggagtaggttttttattagttttagttttcgtataacgagtttttttcggttttagatttttcggtggtttaggtgttggtggagtataatgttatttatatttacgttgttttaggtgagggatgagggggtgagggggttattgttttttaggttttgagtacggggtttttttagttttttagttaagttgtttcgttttttttttaatagtttttattgtgattttatttgggttgatggtttaggtttttattggggtgagggaggggttaggcgtgggaggagtggatagggaagttgggttttttgaattgttttttatcgcggtttggtttttgttgttttgttgtttcgagtgtagttgtatttggaggcggtgtcgtttttattaggtagtttttagtgttgttgtatttgtgtttcgtttcgtacgtggtttgggagtttgggatttttaaggttgggtcgtaggtgtagtcgtttatttcgggttttttaggcggggggtttttgtcgagcgggtggggagtaggtgggggtgtcgcggttgttttatttgggtttgtttttataggtgagtacgttttgattttgttggtatttaatgttttcgagaatcggacgtagtaggtgtttgtgagcgtgtgcgtttttttgttttttgtgagcgtgtgcgtttttttgattggggtttgttggtattttagagtgggtgtttgttttttagtttttgttttttttagttggtttgattgggggtttgtttagaggggtcgtttgaggggagggtgtgggagtaggttttatttcggtttagttttttgatttaggttttggttaagggttgtaggagtttgtgagttaggtttacgtggtaattgcggtttttatatttatatatacgtttgtttttatacgtatttttttaggggtttttagtgagtattgtttgttttttgttagggtttagttggttttagtatattagaacgtatattttagtgttttttgttttgtgtatgttttttcgtcgtttaggttggaaggtggtaaatcggatgagtattttgggagggggtgagtttatcggtagtggttaggtttttgggaaatttggagtttgggagtagtattttttacgggttttttagattttttagtaggttaaatagatttgtgttggaggtaattttatttttacgttaggtgttgattcgtagtggtcgggtgtttattgtgtttttggagtgtgtgttttgtaaggtataggtcgtgtacgaagtgagtcgtagtttttacgtgtatttggagggtcgttgttttaattgtagtagcggttttaagcgaggggtgagtgttgagcggggtgtgggcgggttggggatgggttttatggtcgaggggacggggtttgtaggtagaagtggggttgatagggtagagggttgcgtttttttattattttttttgtttgtagcggtgggttgtacgtacgtttagtaataagacgttggtgttggatgagattattatatttacgggtagcgtaggtatgtgattggtgttgcggcggggcgtgttgcgggacggcgagggatatatttttacgttgacggtgttgggtcgttttggtaaggaggagggttgcgtttttatttttttgttttttaatcgttcgtcgttggggggtttttgtcgtttttttttattgggcgttgtgtacgtttttattattaaggtgtatttcgaatgtatgggtgagtgtaggtttgcgtagggggagtagcgggatttttcgattttgtgaggttacggagttttttcgtgatgtcgtggggatcgttttttaggttggtatgacgcggaggatgttggcgtttcgttggtgtacgttttgttgttgtagcgttgtcgttagggttattgcgaggagttttgtgtttataagggtagttttttcggttacggagtcgtgttgttttcgggttttaggttatatttcgaggtgggtttggtcgtggtggtgtaggattagttgggagtcgttgtggtcgtttttaataggtgagttaggtcgtgggagggcgttttcgagattgttatttatttattatttttttttgttcgtaggtttttggttattatttttttagagtttaacggtagcgtaatggggtttatagtttggttgtacgggtttatcgttagtgtgttttcggggttgttgcggtaggtcgatttttagtacgttatcgagtattcgttggttttggttattgtgttgaacgaggtgagtgtagtttgggaggggattttatatttgttgtatgcgtgttggggattaagatttgtttttttgtttggagttttgcggagggtttatttcgggttttagagataaattttagtgattttgaagtagtatttcgacgtttcgtttttagtagttatatttatcgggtttttttcggcgtttgttttttataatgtagttttcgtttaggagggtttatgtgtttattttgttttgtttatgaagaaatagtttagtgttgcgggttagtgtttatattatatagtatttagtacgtaattgtatttcgggagtcgtgggtatttgttggttttttgtcggttttttgttttgttgatagtttgttgtgttttttgtttgttttagtacgagcgggttttggacgtggcggtagagtttaagtacgagcggtagcgtcgagtttagatacgtaagaatattacggagattttggtgtttttgagggtttatattgtggatgatatttagtagatcgttgttgcgttggtttagtgtatggtaggatggttttatatgtttttttcgtttcgtatgtttgttagggtattgggtttagttttttagggtagacgggtagtttggtcgaggagttgagtttttagtttgggtttttttttgttatggcgtttttcggtttttgatttgttttagtagttttagttattttgttgttttgtgtgaacgtagggtgtttttcgggggatttagggtgtaaagaggggtttagatgtggggagggattaagaagatgttgttttgtgttttttattttttttttttttttttttttttttttttagtttttttttttttttttttttttttaattttttttttttttttttttttttttagtttttttttttttttttagtttttgtttttttttttagtttttttttttttttagtttttttttttttttttttttttagattttttttttattttatttcgttgagtttttttattttttttttagtttttttatttttttattttttttttttttttttttttttttttttttttttttttttttttttttttttttttttttttttttttttttttttttttttttttttttttttttttttttttttttttttatttttttttttttttttttttttgttttttttttttttttatgtgaagaggtgttttgtgtggtcggtgggttgtattacgtgttttttaggtggaggttttgggttatgtagagttataaaaaatgtttagtgaggaggttgtgggggtttagttaagtgggttttttagttgtagggttgggggtgggagttaggtgaggattcgtgtagagaggagggcgtgtgtaaggagtggggttaggagcggggttggatattgttggttttatataggggtttagtagggagttcgtatgtcgttcgtgtttgaagtagacgttgtataagttggaggttatgatgcgtattttgtaggtagagattatcgcgggtatcgtgacgtttatcgttatcggagatagtatttttaatattataggtgtcgcggttcgtgttttacgttattcgttcgttttacgtggttcgttcgttttatgtcgtttttttttttgttttttttttttttataatcgtttcgtttttgttttattttattttcgttttttttttttttttttaatttttatttttattttttttttttaatttttatttttatttcgtttttttaatttttatttttatttcgtttttttaatttttatttttattttttttttttaatttttatttttattttttttttttaatttttattttttttttttttttttttttttattattattttttttttttatttttttttttttttttttatttttttttcgatttttttcgtttttttgtttattttttttattttttttattttttttattttttttttttttttttattttttttttttttttttattttttttatttttttttttttttttttattttgtttttttttttttttttttttttttttttttatttttttttttttttttttttttttttttttattattttttttattttcgtttttatttttatttttttttttttttttttttattattttttttttagttttttttttttttttgtttgtatttcgttttttgtttttttaggtttttttttttttttagtttttatttttcggttttttttttttgtttgtttttattttttttttgtttttttgtttttgtattgattttacgtttgtttgtaggagattttatttatttggttagtttagacgtgcgggtatcgtagcgtttagagttgggagtcgagttattattgcggatggtggcgttttaggtttataatttgatttttgtttttatgcgtatttttacgcgttttcgcgtgtttaacgaggagttcgtgacgttggcgggcgaggagattatggtttagggtaagcgttcggattcgcggagtttgttgtgttatggcggcgttttagggtttggttgttatttttttattttttaggtttttagtagggttttcgttaattttagtgacgtggtgtagttcgtttttttggtggattttaatttttttttttttggttatattagtaattatatcgtttttattaaggtggtttcgatggcgttttagatataggtcggcgtttagatttttatcgagcggttggttttagagcgcgttattatcgtgaaggtgtttaataattcggattgggttgttcggggttatcgtagtttcgttaatttcgttgtggtttagttttaggttttcgtcggtgttgtggttattttggatagtagtagttttgtggtcgtgttgtatttgtagtttaattatacgttgttggacggtgtgtgtagcgggtggggtatacgcggttttttggttttgtttttggggggaaggcgtttttcgtagggtttttatgggtgtttttggtgaaatttgttgttttatgggttgttgggggtttggtcggagaggagttgggggttacggagaagtaggtgttagttttggtgtagaggtttttatggttttttaggttcgtggtagagggtgggtttaggagggttatcgtgggtgtttttcgggtggttgagtttttcggtaggcgtgtgatttgcgcgttttgttttaggtcgttatttgtttgaggaattcgagttttatttggtagtttatttgtattcggagtttcggtttaatgagcgtaattgttcggttagtaggaggattcgtttagagtttttttagggtgtcgattatcggttttatattttttttattttttcggggtgagttttgcgggtcggtttggtagggtagggtagggtattatgggttagtattgttcgggttacgggtttcgtggggacggtaggtagcgaggggattggatcgggtatgggttttgggatttcgatatttaatttggcggagtttgggtttacgtttattgttttttttttttttaggattagagatttagtggggagttatcgtttgaatttttttagttattttcgttggtcggcgttggaggtgttcgtgggtttgtatacgtttttgtgttagtattttagcgaggaggatgtggtgtggcggatagaggggttgttgtttttggaggagatttcgtttcgttaggtcgtttgttttattcgttattttatcgttttcggcgttagtttttttatgtttttaagttatgtacgttttgtgttttttgtgagtgattttgtgtttttgggagtttttgtagagtcgaggagggtttgggtgggttcggttttattttgagaaggtatagtttgtacgtgattttttgggttcggcggttgtgtttttataggagtcgatagcggatgtaaattatatcgttatgttgatatgtgttgtgtgtttggtgatttatatggttatggtcgttattttgtataagttggattagttggatgttagtcggggttgcgttatttttttttgtgggtagcggggtcgttttaagtacgagattttcgttaagataggttggggtcggggtttaggtgaggggcgcggcggggtggtagggttttttttgtttttattggttgtgttggttgtattttttgggagtgagtttcgtcgtaggcgttagaataaggtagtttttgtagtgttgtgtgaagggttcgtgtgtttattttgggaatgatttcgtgagtatttattgtttttgaggattaggatagtttttagttggaagtaggtgttagttagttagggtgggtagtttacgttttgtatagtagcgtggttttataagtgatatgagtatcgttattattgtgggagattatgtatttattcgcgattttgattgtatagttcgttttttagacggaggtgttagtatttttttcgtggttgtttttttaatatttttatttttttttattggaattgtttttttggtattttttttttgttttcgtttttttttttttggagacggagttttattttgttgtttaggttggagtgtaatggcgtgattttggtttatagtaatttttagtttttgggtttaagcgattttttttaagcgatttttttgagtagttgggagtataggtgtacgttattatatttagttaattttttattatgttagttaggcgaatttttgattttaggtgattcgtttgtttcggtttgttagagtgttgggatgataggtgtgagttattatatttggttgtgtttttattttttattttcgtgttgtttttatttttattttttagtttttttgattatttatttttaaaaattgtcggtcgggcgtggtggtttatatttgtaattcgagtattttgggaggtcgaggtaggtaaattacggggttaggagatcgagattattttggttaacggtgaaattttgtttttattaaaaaatataaaaaaattagttcggcgtggtggtaggtatttgtagttttagtttttcgggagattgaggtaggagaatggcgtgagttcgggaggcggagtttgtagtgagttgagattgcgttattgtattttagtttgggtgatatagtaagattttattttaaaaaaaaaaagaaaaaaaatattgttatttgggtttgttattgggagaggaggtgatatagttttacgtttcgtagtttgtgtatgaattgagggacgggtgtgtggtgcgggttattggttgtggcgtgattgaggcgtggataggtgtgtagcgcgggttattggttgtggtgtggattgaggcgtgtgtagttatgtttgtatgttataagttatagtttttttcgtgtaatttaattatgtttttgaggttttgttgtttattggataaattgtagtaatcgtagtttttcgtgtatggtagagtcgtgtaaagtcgggattgtttgtgtggttttttgagtgcgcggaggttaaagttgagatgatttgtttgggatgttatacgtgttgggtagtagatcgagttttttattttttttttttgttttttaggtattacggtttacgtgggtattatgttgtatggggtggatagtcggagcggttatcggtatttggacggcgatagagttttttatcgtaatagtttggatatttttcggatcgttatttcgtatagtttgggtagcgtgtggaagattcgagtgtggtacgataataaaggtttgtgcggattttgttaagttttgtttttttgttttcgtattggggcgttttgcgagtttgatttttttttcgcgtttttgtagggtttagttttgtttggtttttgtagtatattatcgttagggatttgtagacggtacgtagtattttttttttggttaatgattggttttcggtggagacggaggttaacgggggtttggtggagaaggaggtgttggttgcgagtaaggtttcgttttatgtttttatttcgtgggaggttgggtagggtggttttgtttcgtggttttttgtagtgcggttttttttgttttttaggttacgtagttttgttgcgttttcggcgtttgttggtggttgagttgtagcgtggtttttttgataagtatatttggttttttatatgggatcggttatttcgtagttgttttattcgtatttagagggttatttgttgcgttttttttatttgtttttttttgggcgttaacgtcgtgtggtacggggttgttggtgattttgtttataggtgggtgtcgtaggggtcgggatagtttttttttgtttagttttttttgttttttagttttatttgtgtggtttttttttttttatatagtacggggtatgtgtttaggttgagttcgttgagcgtcgatatagtcgttgttggtttggtgtttagcgtggttgtttatttcgtttatttggttattttttttttttttcggatgtttcggagtaaggtgggttggggttggggattcgggagtattgggaatggagtttgggtttcggtattatgtttagggtcgttattttttagtgttgtagttagagggaaaggcgtttattaaaggttgttcgggaagggttaatatatttgagtagttttagttagattgattagggagaaagagagaagatttagaagttagaatcgtgaaagaacgagggtatttcgttaagtagacgttacggataattgtatagtagtacgttagataatttagaagaagtaagtacgcggttgtgtacgttttcgaaatgtattttagaagaaaattttagtatatttatagtaagtgaagaggtcgagttagttttttagaaattttttagtggtcgggtcgggtgtggtggtttacgtttgtaattttaatattttaggaggtcgaggtgggcggatttgagtttaggagtttgagattagtttgggtaatatagtaagattttatttatataaaatattaaaaagggttaggtacggtggtttacgtttgtaattttaatattttgggaggtcgaggcgggtagattagttgaggttaggagttcgagattagtttggttaatataatgaaattttgtttttattataaatataaaaatttagttgggtatggtggcgggcgtttgtagttttagttattcgagaggttgaggtaggagaatggtatgaatttaggaggcggagtttgtagtgagtcgagattgcgttattgtattttattttgggtaatggagtaagattttatttttaaaaaaaagaaaaaaaaaattttataaagaaaagtttgggtttagagtttttacgatagaatttttttaagtagttaaggaagaattaatattaattttttatagattttttttaagaatatagtaggtgggaattttttttatttatacggaaacgggaggtcgtattttttaggaatgtatacgtggggtttttaagaggttatatgtaaattaattttagtagtatatagagaaggcgtataagtcgcgattaggaggggttgttttcgagttcgtggtaggaattagaggttatatgtggttgttcgtattaaagttaattaaaatggaacgatggtcgggcgtggtggtttatatttgtaattttagtattttgggaggcggaggcgggtagattatttgaggttaggagttttaagattagtttggttaatatagtgaaatttcgtttttattaaaaatataaaaaattagttgggtatcgtggtaggtatttgtaattttagttatttaggaggttgagttaggataatcgtttgaacgcgggaggtggaggttgtagtgagttgagattgcgttagtgtatttttgtttgggtgatagagcgagattttattttaaaaaaaaaaaaaaaatgaaatttaaaattttgttttttagttgtattagtttgttgttaagtgtttagtggtatatgtcgcgaggggttgttattacggacggtgtagatgttttatatatttagtattttaggatattttgttagatggtatcgggttttgttttgtttgttgaggaggtggttttttatttttgttttgagtaggtttgagttgtcgttcgttgattattgtcgtcgttttgtaggtggttgggagtttgagttttatatttgtcgggtagtaggtgttggatatcgatagttgtttggattcgttcgtgttggatagttttttttttacgtttttaggtttttacgttgaggtgagggttttattgggggttttgggttgggttgggggttttgtcgttttggcgtagtttggattttagatattgtgtattttttagtaggtttttgttggataggtgaagagtgatttgtttttggatgattttaagaggtgggttttttagagaaatttcgagttttggtgtaggttattgtgtttggagtatcgggggtgtgcgggttgcgtgtttttgttgggtgtttgtggttttatgtggttatattacgtgggagtaggtttgttcggaagtttagggtgttcgtgcgtgattggacgggggtgggttgtgtgtgtgatatattttttggtattttgttgattcgcgttatttgtagtttggtgtgttggttttttagcgagggaacgtttagttggtcggatttgtttagtgattcgtttattgtgggtagtaatttgcggtataatttttatttattgggtttttttttttataattaatataatcgaaatttagggtttttttttttttttttttttttttgagatagagttttattttattttgttatttaggttggagtgtaatggtacgatttcggtttattgtaattttcgtttttcgggtttaagggattgttttgttttagttttttgagtagttgggattataggcgtgtgttattatgtttggttaatttttgtatttttggtagagacggggttttagtatgttggtgaggttggtttcgaatttttaatttcgtgattcgtttgt

SEQ ID NO: 153 - DNA, 2204 bp, Artificial Sequence
  chemically treated genomic DNA (Homo sapiens)
agggataaatttatttaaatttttttttaattcgttattttcgggattttaattagaattgggttgtttttttgcggttttttcgacgttttatttttaattagtttatagtttttgggttttgtttttttttttattgtatttttaaaatgtaaggcgtaacgataatagtaacgttttagttatttttgagattttttaaattttggatttgtttttttttttttttttaaagtttttcgaattttttttagcggataaatgaagggattgaagttggataaaattataatttaggagattagggatttattttattttgtttttcgtgtttggaattagataatttaggacgtcgggttcgagaagtttggataaaaaagttaggaaaaattgagtttcgttttgatttttagcgtcgtggcgggttggtatttgagttggtaacgtgcgtggtaggttatgtaagaaaagggatggaggagtcgttttagcgggagttagaaaggacgcggtgttttcggttgtaatttttattttttttatttagtagggtaggaggtatttaatttggaggagaaaggggtgggggaggtgaaatagagatcggagagttacgagggttgggtcgtcgagagtaggagaatatatcgtgttatatatttttatttttttatatacgttgtagatataaattattgacggtttttacgtgttgcgttcgtgagcggaggtgtttaaagagggggtagatgagttatttttcgagacggaatcgggggttttacgttcgtcgtttttagtagtataattaatttttgaatatttaaatcgcgtatttttggcgtattattattttatttaaggttacgggtttcgtttttttttttttttttttttttttttattttttttttattttttttttttttttattatcgggttttttttagtagtcgtatgtaggggaggagtacggaatgttttttttatagttaattattatttggttgtttttttattggttgagtttttttgtattgtagtaaatgggttatggattttagtaattagagttacgtgttatcggcgatataattaatgagggcgcgagatttgtgtaagtagggggaggtacgtgtcgggtcgtacgtgtttgggagggggggaaggggcggggtttattgagagaggcggaggtgggtagatagattcggagagacggcgaaggagttggaaatcgagttagggttgagtcggttgataataggtaaggagattcggaggataaagcgagttgttagggagtatttgggagtggatttgggggttgaatgtagattttggtattgggagggtttgtattacgtggtaggtgcgagtttagagagatcggcgtagggattttgattttgaaagattgggagagggtaggaggttagtttttatgggggcggttttcgtaggattattaggtgggttcgcgtgtttagattgattgtttgtgggtggtatggttttaggtggagaggtttgttgcggatttaggttggcgaatagttttggcgaataacgggcggaggggaaggtgttttttaagtcggtatttattttgaattgagggaagaaaagaacggaggtcgcgttagatcgagagttgttttgcggcggttagagagggaattttaagtttttaatgggcgggggtgggggtagaaatgtttttttttattgtgtttgagatcggtaatattggggagggggagaataagtattattttacgtagtatattttaattttttagtttattttttaatttttaaattttggttttaaattttttcgttttgttttttagttgtaggtttcgatttttgggtattttaggagttgttttatagtttttgtttttggatttatggattttttatttagcgtttttttttattttttttatttttttttttcgtttttttttatttttttagtgaatagtgattttggttttttttttgatagtgagagggaggataagggggtttatgggtttaggttagatattgttgggtagaggggaggtttacggtttagttcgggttttattcgttgtaggtatcgatcgaaggttttcggtaattagtatatattattttattcgaaatagcggggttcggttttttttatggtaggatttggggcgaaa

SEQ ID NO: 154 - DNA, 2204 bp, Artificial Sequence
  chemically treated genomic DNA (Homo sapiens)
tttcgttttagattttgttataggagaagtcgaatttcgttgtttcggatgagatggtgtatgttggttatcggaaattttcgatcgatgtttgtagcggataggattcgggttgggtcgtgaattttttttttgtttaatagtgtttggtttgggtttatgggtttttttgtttttttttttattattagaggggaagttaaagttattgtttattggggaggtgggaaaagacgaagagagagagtaggaggaataggaagaaacgttagatggagaatttataggtttagaagtaggggttatagaatagtttttggagtatttaaagatcggaatttgtaattgaagagtaaagcgagggagtttgaaattagagtttaaggattaggaaatgaattgggagattggggtgtattgcgtgggataatatttgttttttttttttttaatattatcggttttaaatataatagaaaaagatatttttatttttattttcgtttattaagagtttgggattttttttttggtcgtcgtagagtagttttcggtttgacgcggttttcgtttttttttttttttagtttagagtaaatatcgatttgaaagatattttttttttcgttcgttgttcgttagggttattcgttagtttgagttcgtagtaagtttttttatttgaggttatgttatttataagtagttaatttgggtacgcgaatttatttggtgattttacgggaatcgtttttatagagattggttttttgtttttttttaattttttaagattaggatttttgcgtcggtttttttgggttcgtatttgttacgtgatgtaaatttttttaatattaagatttgtatttagtttttaaatttatttttaaatattttttaatagttcgttttgtttttcgaatttttttatttgttgttagtcggtttagttttggttcggtttttagttttttcgtcgttttttcgggtttatttatttattttcgttttttttagtgggtttcgtttttttttttttttttagatacgtgcggttcggtacgtgtttttttttgtttatatagatttcgcgtttttattggttgtgtcgtcggtaatacgtgattttagttattgaagtttatagtttatttgttatagtataaaggggtttagttagtagagaggtagttaggtgatgattggttgtaagggaagtatttcgtgttttttttttatatgcggttgttggagaggattcggtgatgagaaaaggaggaggatggaaaaagagtggaaaagaagggaggggaggaaaagggcggagttcgtggttttaaataggatggtgatgcgttagagatgcgcggtttgagtgtttagagattggttgtgttattgaaggcggcggacgtgggattttcggtttcgtttcgggaagtaatttatttgttttttttttgaatattttcgtttacgagcgtagtacgtggaaatcgttagtgatttgtgtttgtaacgtgtgtgagagaatggaggtgtgtgatacggtatatttttttgttttcggcggtttagttttcgtgatttttcggtttttgttttattttttttattttttttttttttaagttgggtgttttttgttttgttgggtgaggagggtggggattgtaatcgagaatatcgcgttttttttggttttcgttggggcggtttttttatttttttttttatataatttattacgtacgttattagtttagatgttagttcgttacgacgttagaggttaaaacgaaatttagttttttttgatttttttatttaggtttttcgggttcggcgttttaaattatttgattttaagtacggggaatagaatggggtaggtttttgattttttaggttatggttttgtttagttttagtttttttatttgttcgttggagaagattcgaaagattttgaaggaggggagggaggtaagtttagagtttagagagttttagaagtaattgggacgttattattgtcgttgcgttttgtattttgagagtataatggagaggagagtagggtttaaggattgtgagttggttgaagataggacgtcggagagatcgtaagggggtagtttaattttaattagggtttcgaggatagcgaattaaaaaaaaatttaagtgagtttgttttt

SEQ ID NO: 155 - DNA, 13135 bp, Artificial Sequence
  chemically treated genomic DNA (Homo sapiens)
ttcgtgtttgttttcgattttattttttaaattagacgtttagtttggtgtaaatgtaggagtggagtttttagggggatgtggattttttttttttatttttatttcggtttttgttttttttttttcgtttttatttcggtttttgttttttttttttcgtttttatttcggtttttgttttttttttttcgtttttatttcggtttttgttttttttttttcgtttttatttcggtttttgttttttttttttcgtttttatttcggtttttgttttttttttttcgtttttatttcggtttttgttttttttttttcgtttttatttcggtttttgttttttttttttcgtttttatttcggtttttgttttttttttttcgtttttatttcggtttttgttttttttttttcgtttttatttcggtttttgtttttttttttttgtttttatttcggtttttgtttttttttttataggaggagtttgggggttttcgcgttataggggcgtggtttagggtattaggtggggcggtgggtattgggtttagagtggttttgggttgtttagtttttttttttttttttaggattagtgatttttttagttttaggatattttttgggttagggtttagggtagagttaatgtttttttagatattttttggttgtaaattttaggttgggggtttttggggatagggatgtaggtgtttaaggatacgattttttaggtagtggacgtttttgtttgggtggagggtacggttacgagagtagggttcgcgttttggtattttggtgttcgggttttttgtttttaaggtttgttttgttttagtttagttttttttggttaggtttattattgttagtaaatatttttatattgttgtttttttagatggttatggtagttttttcggggttcgtgtttgtagtttttacgtagttcggtcggtcgatggaaacgtatatttatattttgttttattttatttcgagttgggggttcggggattataggttttatttgtataggttgtatttggggaatgggtttgtggtagaaaatgtgcggcgcggggcggggggttttaattaggtagttttaatttggatttttttttattttcgttttatttttttgtttttagtatacggtggcggagtgcgtggggttagtttggcgggggttttgtttttcgatttgtatttagagaatagagtattttacgggagagagtagttcggaacgtagtttgagtaatgtcgattttatattagtatatttagtgtttttacgttttcgttggtttaggtttcggagattatgatggtatttatagtggatttcgtaaaggagcgtggggatttcgaaggttaggttattttttagaggggggttttatgttaaagtagacggtgtcggtgtcgtagggcgtttgagatttacggtggagttcgggtttggcgtgcgggaggcggttacgacggcgttttttttttaggaatttcgggagggattttaggatttagcgttagggtagttttggtaggtgtagtgaggtagtgatttgtgggggttagatgtgggtttgttttacgtgggtagggattagttaggtatgggggtttagcggattcgagcggggttatagagttttggaggatttttttgtataatgaatttttgtttaaaaatagagattaagaggaagttttattttgtagtttcggaaatgggtggttgcgtgtttggggttttcgttacgcgggaggatagtttagaggtattttggttttaggtagttggtttttaggttgtgttttttttattggtcgggtatcggttggaacggtacgaggattagttttattgtttttagaggggtttcgggttattgggtgtggtggtgttggaggagttttgttcgttgtgggttttggagggtacggtagtagagtttttggtttttttaggtagagcggtatttgttttatagatcgtgttagttttggttgtaggcgttggggttttatcgtgttttttgggggggttcggattttttaaggtttcgatttgaagttttgaggttttatggatgtttgtttttggttcgataaacgagatggttgtggtggggaggagttttaggcggttcgggattttttggcgttcgtcgttgggaggcggagggatttagagtcgaggttgtgtttaggattgtttcgggcgtcgggcgatgttaatattttgtgttggttttcgttaaggggtcggttttcgggtttttgtcgttaagtgcgtggcgtggtttcggtttttaggttagatattgttgatacgggtttttttcgggaaggtagcgggattcgtggttttgtttaggggtcgttttcgtttgacgtagcgcggttttcgtattgaaacgggttagagataggcgaggttagagtgggatttggatagtagggatagtgtaggttttagtttttatcggaggttttcgggagtgggtatatggtataggcgttcggggttgtttattttgattaggtgggaatttagatgttttttgtttttaaggcgtttttagagttttagttcgggaaagggacggtttttttttgttcggttgtgtttttttatttatattttgggtttcggggtttggataagggttaggcgattttcgaagatagagatgtgggttttagagtattatgtattttagggggcgataagtaggtcgtagttttaagatttcgaatgtgattttatttagaagaaggggttttgtagggggttacgttagggttttaggtgtgatcgtttagggtttttcgggtaggttttgaaataacggttagggtttatttgagagagaggtagagagagaagacgtagaggtgggggagacgtcgtgggattaggggatagagacgggtaacgtagttatagatgtttgagtcggtaggggttgggaaggtagatagcgtttttttcggagtttcgggaagcgtgtggttttgtttgttttttggttttggatttttgaattttaggatagttagattaaaggtttgttgttgaagttggtagtttcggggtattcgggtatcgtggggtttgttgggtatttgtagatagggttgttttagggacggggtacgtttagttttgatggagaacggtttgttttttaaaggtacggttatttgtttttatgatagatttttgtatagggggacggaggtcgggtgagttttgtttatggttttggagttgtgtggttgtgcgtcggttatttagtttgtgtttgtggtttcgtatataaaatgggttttaatcgggttgatttttgggttcgtttgatttagtattattgaagcgatggttgtttaggagggtttggcggaggtcggttgcgtttgttttcgggtggagttggattttaaggaggagtaggtattgggggtttgttttgtcgtggtgggttttttttttttgtagattttacgtttcgggaataggaaagagtatggaagttacggggattaaaggggggcgggtagggggcgtcggttaaatttagttgagatttagagtagggggtattagttaaattcggttttggttttgttttgtgggtgggttttttggggattcgggtaggggtggtcgagatttagagttaggtaaattcgtttggggataaatttatagagtattttgggattggtttagagatgggaaattttatagggggatgcgatagttgttgttatttgaggattgtggcggggggattattgtagttttgaaaaggagagaaaggtagagtgaggattcgggatggtttggtataggtatacgcggttagggacgtttagttcggatgatgtgggttatttacggtttcgttaggttgtagggtcggagttgtgggggagaaagcggagagttattttggagtttaggagttgttttaattttagtttagtgtagcgttcgggatagtagagcgaggagttgttttagttttagtttagtgcggcgttttcggagtagtagaggtttcggggttgtagggttttttttaatttttttttgcggtgtattagtttggttttcggttttgttatattttttcggggtatttataggtgcgggggtttttttagtattttaggtgagttttcgttttttggatttattttttcgttttagtagaggggataagttttttttatgagaagcgtttttttaggttttagggttttaggggaagggttgtttttttattttttcgggaggagttttaggtacgaggtggttttgagttttacggtcgtgggtttttgtttttatggtgttttcgcgatgggggtgtcgtggtatcgtggttaatttggtttttcgtttcgtggttattagggttgattaagttttgagttttgttttgttttaagggtgtttataggtagagatgttgagtaggtcgggtttttcggtgtttggttgtgtaggagattttggtagcgggttttcgattggaggttgggttttgagatttcgagagaggttgagggggatggataggggttttatagtagttaggtggggttgtttagagatttgggaggaggttttagttcggttattatagtttggttaagtgtttattttggggttcgaattgttggttggattatttgtttggtagggattttgcgggggtcggttttggataacgagggtaggtattacggattttgtttagaattcgttttcgtttgaaggtattatagttataaggtcgtttttttagtgggaaggggttagtgtttaggttcggggtgatcgtgtgtacggcgtggcgtaggttggggtgtgggttttgtattagtttggttagttttgattttaggagaggggaggggggattatggttgttggaggagtttaggtaagtttaattgtcgagagttatttagtttcgttttattcgtttttcgtgatgttttgagggtttcggggagacgtttttgtcggaagagggttttagtagaggttttgggtttcgaggaaggttttttggtgtttcgattttttaaatttatatacggttgttttcgggaagtgacgggtttttttatatcgggatttaaaagttataggataggttttgttttttttcggtttttgttagtttgttttggtttgggatattttagttttaggtttatttttacggttggatgtcgtttgttttgtgttttttcgtggggtaggtgttggttcgggagatatttttgttttttttgtagtaggttttggggagtttattggagcgtttgaggtagaagaatttagttacggagaggatgaggtcggagttaatgaagaacgtgtttaggaagagggaggcggttacgcgcggagtttttgtaaatagatatcgttgagtagacgggtaggacggtggttttggtttttcgtttggttttcggtgttttttgtatatggtagatgcgttgttttttgaatatgtttgagttttacgggatcggttgtgggtgtcgagggttttgtatatgggtttgggttatttttgtaggtttagttatgtttgggtatttggtcgcggggtttgggaaagttattatttgtttcggttttagttttttttaggagttcggatgttgggagcgttataggggttgattttggtcgggttttgcggaaatattttttcgattttagttgtttttgaaagttagggggtttttagttttgttttttttttcgggtttagtataggttttggggtttttatatagggtagagttttaagttggtagtaggtgtttttgtattttatttatttttatttgtttgggttaggataggttagggttgttggtttggggttcgggatagttggtaatggttgttgggtgtgttttgagatgttggggaggagattttttaattttgagatataggcgtgtttgttaggtttgggggtttcgtttttttttgttttagtatagagttataggaggttaggagtttatttaggttaattttattttaaaatattgttatttaggttagtaatggatttaggttagtttagggtcgtgagtgtgaatttgagagcgtgtagtgtggtcgtgagcgtgaatttgagagtgtgtggtgttagcgtgagtcgtgagtgtgagttttaagtgtgaatttaagagcgtgcggtgtggtcgtgagttatgagtgtgaatttgagagcgtgtggttgtgagttgtgtgattttgagagagtgcggtgtggttattagggttttttttaattacggttttttagagatgtggtagagttttttatgacgttttatattttttatttatattagttgattttaagttgtaggggttgttacgtttttttttggttgttttgtagaattttgagtttgttgtggttgcgttaagggtgagggtttgtattggtttcgacggtttttagtttttaggatatcggtagaggtggttgtggtttgttgagatttattaggatgtggtcgttcgggggtttttgagtttttgtttatggggaatggcgtattcgggttagtaattgtgggatagtagaattgtgggaagtttgtgtgtacggagtttacggggatatttacgtgtattttgaagggattttaggacggaaatatgaaagcgaggggttgagggggcggagtagtttttattatagagttgtttcgaatggtttagtagattcgggaagagggggttttcggggttgttttttagtggatagtggttttggggtaaggtggggatatagatagtaatttttatagtgttttttatagttggagttgtgagaagggagtcggggggagtcgggtagatttatagtttttatattcggagtcgttgtaggttgggagggtttcgtttttatagcggacgtagttggcgttttcgttcgcgttttagcgtttgtaatagtttgcgtggggtagaggacgggtatgttagttaaagtaaaatttatattagttgggttttttgggaatgattttttatttgagttggtgagataatttttattttagatattaatatgttttggagggtaggtgggcggtagataaggatatttttagggagtatggcggggtcgtgagtattttacgttgagtattttatattgcgtattttgattttgagtatttcgattttaagtattttacgttgtattttttacgtcgagtatttcggtttcgagtattttacgttgtattttttacgtcgagtattttagtttcgagtattttacgttgtattttacgtcgagtatttcggttttgagtatttcgattttgagtattttatattgcgtattttagagagtggtaggcggtagtatttagaatgaataggtttgttggagggattcgtgttttgtaggattgtaggttgggttcggtttttattatttagtttttattttatagattttttaagaatttttattgtaacgtttgttttaggttttttttaagattttttttacgttttttttaggattttttaacggttttttttaggattttttttttatggttttttataggattttcgtatgttttttttagggttttttacgttttttcgggatttttttacgtttttttgggatttttttacgtttttttaggatttttttacggttttttttaggattttttacgttttttttaagatttttatttgtagtgtttggagcggttgtttcgtatttcgtgtttttttatgtcgtttaagtaggataggtttattcgttagtagtatagttttttgttttaagttgatttcgatttttggtttatttgttatttttatattttggtattttttttcgggtttttttcgggggattttgtagaattaagttttattttttcgttaggtcgacgttgcgtttgaagttttattttcgtttatcggttagggcgtttttaaggataggaattgatttttattttttgattttttaaatatttttaatatttagtttagagttgagtagatatatttttgatgtcgattgcggtgcggttgttggtgcgggttacgggtggattatacgtttcgatttttttttatagattgatttgaatataaacgggtcgcggcgatacggggatttcgcggtggagagtgggtttgagatttcggtacggttgtgataggggttattttgtagatatattttttggaagaatggaagtttattcgtttagttttattagggtggagttgcgtttttttagtattgggggtagtttttgtttttcggtattttttggtatagggttcgggcgattttagcgaggttttgtttgagagtttttgtttcggaggtcgaagaacggagtttacggtagggagttaaatattagcgtagtattgtttttagaagtgttcgttgttttttcgagcggagacgtgatttggtttggggtcgtacgtagggggaagcgtatttaatatcgtaggttcggtttttttttacgcgcgttagacggtttttattttgcgtttgtgtatggggttatttcggtttttggattttacgattcgttggtttggtttttttatgggtatcgtgattgttgtatagttgtttgtatttatagagtgtttggggtatataattttttataggagacgttacggttttagtatttttgttgttatggggtgttaggggagtggtttttatttagttattagggttttagtattagacgatgaggattttaaggtgtttagtttttttttagtttttttgtttttttttagagcggtgtttttttttttttattttgcgtgtgttttagatgttattattgtttttttgtgggttttttaatttttacgtttagtttcggattttcgcgtttagttttattggttgttatagtcgtcgttttgattacgttttttttacgaggtttttgagtttttaggagtagtttttttgggtttttttattatgggagggttggatttttaggatgggagtgttaaggtttttggaggtatagttggggtattttagttttaagtttattaagggtcgttaaggagtggtttttgtatttttttattttgttttttttttttttggttgtttttattggttgtttttattagttttaattttttgatatttagttgtttttagatagtttttttcgtagttttttagaatttttgatgaatagggtttgttcgtggtacgttgatataggtcggtattttcgtggcgttttgttgattggtattttattttacgtattaggggttagtagtatttttgttcgagtacggataggtaaaaatgttttgggttttgttagaggtttttggagttaggatagtttcgtgagaatggttgagtttatgggttatttttttagatttttttttaggtatttttttgattttagtttttgtttttgtttttagttttttgttgggttagtttttttatgaggttgtcgtttaaggtcgttcgttagaaaggaggtttagatgtttttttttaagttttatagtttttattgttttatttattttttaggtttcgtagtatagatgagtattgtttttgttatcgaggggagggttttgggtatatatatattagtggtttaggggtcggtttggaatttgtttgggataaagcggtttatttggattatatagatttgcgtttgggtagttggcgttgacgtttattatatttatatagtattcgggtagttgggtttggaggggatacggtagtgaaattttaggacgcgtttgttaggtaggtttacgtttagagtagtagcggttgaggggtgtcgtgggagtatattttaatgttcgtagtttcggttttttttggagttagtatcgggtggttttttgttttttgtgggtttgggagtaaggaggggttttatagttatagtgtatatttttgtgggattttgggtgggcggtttttaaggaaaagttgggtttggaagagtaaattatttttaggaggcggtattcgtaggttatggtagcgttatcgatattttttgtaagttttcggaggttttttattaggggttttcgtttgattttatagaggaagtgttcgggtttggttggtattttaggggacgaatttacgtttaggtgtttaggtattgtataggtgcgttgggtgttggtatttacggtgtgtgtgagggtttattttttgattataggtagattggataggtttggggggtttagggtatttttagtttgtgtgttgattatagttgtgttgtttttcgtgatttgaatgtagtgaacggtgagggcgtttaggggtgattgcggagtgcgggatagaatttatatcgttagggaggggtttaggttcggttttttaaacgttttagttaggatagtgaggggtttttattttttattcgtttcgtttgggagtttggagtcgtcgtagttatatttttcgatagcgatgcgcggtacgttgtgttgttatcgttggtagaggtgtttttattgcgggttaggatgttttatcgtgggggtttcgtttgatttagttatttttgagtaggcgtttatttagtaggtagcggagggtttttttttgcgaggtataggtttttttgattttagtagtggatttggttagtatttttggggttgggatattagtgttttaaaggtggaagggttagattttttaggggaagggtttatcgttttttatagaggttttggtttaggtcgcgtggatacgtgaggggggtatttatcgtgttttttatggatttgttggcgatttttacgagaaggttagttaggagggcgaggtgtcgtagcgttatgttaggagtagatgcgtagagtttgttatagggaggagtatgcggagttaaagagatggagtggggttgaggtagggtgggtggggttaaatgaaagtggggttaagagatgttgggggggtgcgggttaaggtaaggagggtagagttaaatggagatgggtggggttgtggtggagggtggggttaaatggaagtgggcggggttgtggtggagggtggggttaaatggaagtgggcggggttgtggtagggagggtggggttaaatggagatggggtggggcggggtcgcggtagatgattgagttaaatggagatggggtagggtcgtggtaggggtgtagggttacgatagggaaggtggagttaaatggaggtggggtgaaagagtgaaggtttggggtttttggaggtacgggtggggcgaggtgtaggtagggttttatttgtttttttaggatggggattatcgatattagttttttgttcgtttgggtgtttaggggttagttttgggagtttatgggtttagttgagttttgtagatttcggtttagttttgtagatgaagatagtaggtgaggtcgtggttacgcgagggtaatttaggtgggtcgtggtttacggtgcggggtttgggttcggttcgggttttttgtttatatttttgtcggtttttggttgtcgagtagggcgttttggaggggttgtttttacgagtgtttttttcgagttggttttttggttttttgcgggtgagagtgtttgggatataggttttcgttgggatacgggttttcggttcggtttttgtttagggattaggtacggagtttagtggtttaggttgtatttggtggatatcggttttttcgtataaatttttttttttttttttgtatttttagttataggatttgttattatggttttgtttttttaagggaggaaacgtttgttaggcgtataaatttttaagtggtgttattgtattggtttaggggtttttttggtaagttatttcgaggggggttgaggtttagttaggtttgtggggttttttttgatgggtttaggtcggggttttgggataagggttgtgagtagtagggagacggaggttttggaggatatagttttagtttttgtatagggacggtttatttttcgtatagggacggtttattttgttatttattttatgttggatttaggttatggttttataaattgattaggttgtttaggtgtgagtttgtcggaggattttggaaggtgggggtggtcggaatgtttgagtttaggagttggagatttatttgggtaatatagttcgtttttataaaaagtttaaaattagtcgagtttggtggtgggagtttgaggttttagttatttaggaggttgaggtgggatgattatttgagtttagaaggtggaggttgtagtgaacggagattgtattttagtttgtgtaaggggaatttcgttttaaaaaaaaaaagtatgtttttttttgatttagttttttttttttgatgtgaaatttttttagatggaacgtgttgaagttatagatatgttgttcgttttatttatagagtgtaattaagttttagtttgtttttttgtttttttaatatttgtttagtagagatcgtttttttttgtttagtggaaaattttagatattatagatttttttgttttttttttggttaaagggtattttgagggttatattaagttataaaatattattttgatttaggaattagaagtttaagattttaattaatatttttatttgttatttagttaattttatggagatttattttatatataataaattatattcgtgtaaagtatataagcgggtgagtgtgattatttttttgaagttgttattatagttaggacggtgttcggttttatatagttgttagtattcgttgcggtttttataagttcgggttttcggtagttaggagttgattagattgtagttgtattttttagggttttatataaaggggttgtatatattgatttttagatttttttatgttgttttattcgtattttttttttttttatagtcggaggattttttattgtgttggttaaacgttatcgttt

SEQ ID NO: 156 - DNA, 13135 bp, Artificial Sequence
  chemically treated genomic DNA (Homo sapiens)
aggcggtgacgtttggttaatatagtggaaaatttttcgattgtggaaaggaagaaagtgcggataaaataatatggaaggatttaaaggttagtgtgtgtaatttttttgtgtaagattttagaagatatagttgtagtttggttagtttttggttgtcgggagttcgggtttgtgggggtcgtagcgagtgttggtagttgtgtgggatcgggtatcgttttggttgtggtggtagttttaagggggtggttatatttattcgtttgtgtattttatacggatgtggtttattgtatgtaaagtagatttttatgaagttgattaaatagtagatgaaagtgttgattgaaattttggatttttggtttttgaattaaaatgatgttttgtgatttaatgtggtttttaggatgttttttaattagagagggagtagaagggtttgtgatgtttggagttttttattgagtaggggaagacggtttttgttgggtaaatgttaaagggataaaaggataaattaagatttgattgtattttgtgggtggggcgagtagtatgtttgtgattttaatacgttttatttgaaaggattttatattagagaggaggagttgaattagaggagagtatgttttttttttttgagacggagttttttttgtataggttggagtgtagttttcgtttattgtagtttttattttttgggtttaggtgattattttattttagttttttgagtagttgggattttaggtttttattattaggttcgattaattttaaattttttgtaaagacgggttgtgttgtttaggtgggtttttaatttttgagtttaagtatttcgattatttttattttttagagtttttcggtaggtttatatttgggtagtttggttagtttgtgaggttatgatttgaatttagtatggaatgggtgatagagtggatcgtttttgtgcggagagtggatcgtttttgtgtagagattggagttgtgttttttagggttttcgtttttttgttgtttatagtttttgttttaggatttcggtttaggtttattaagaggagttttataggtttggttgggttttagtttttttcggggtaatttgttagggaggtttttgagttagtgtagtgatattatttgaggatttgtgcgtttggtaggcgtttttttttttaggaaggtagggttatggtaataggttttgtggttggaagtgtaggggggagagagggggtttgtgcgggaggatcggtgtttattaagtgtagtttgggttattgagtttcgtatttggtttttgagtaaaggtcgggtcgagggttcgtattttagcgagggtttgtattttaggtatttttattcgtaggaggttaggaggttagttcgggggaaatattcgtggagatagtttttttaggacgttttgttcgatagttaggggtcggtaagggtgtggatagagggttcggatcggatttagatttcgtatcgtaggttacggtttatttgggttgttttcgcgtgattacggttttatttgttgtttttatttgtaggattgggtcggggtttgtagggtttagttgagtttatgagtttttagagttaatttttgaatatttaggcgggtaaagggttgatgtcggtagtttttattttggaggggtaggtaaggttttgtttatatttcgttttattcgtgtttttaaaggttttaagtttttatttttttattttatttttatttggttttattttttttgtcgtggttttgtatttttgttacggttttgttttatttttatttaatttagttatttgtcgcggtttcgttttattttatttttatttggttttattttttttgttatagtttcgtttatttttatttggttttattttttattatagtttcgtttatttttatttggttttattttttattatagttttatttatttttatttggttttgttttttttgttttggttcgtatttttttaatattttttgattttatttttatttggttttatttattttgttttagttttattttatttttttggtttcgtatgtttttttttgtggtaggttttgcgtatttgtttttggtatggcgttgcggtatttcgtttttttggttggttttttcgtgggagtcgttagtaagtttatggagaatacggtaggtgttttttttacgtgtttacgcggtttaagttagagtttttgtggagggcggtgggttttttttttagagggtttaatttttttatttttaggatattgatgttttagttttagaggtgttgattaggtttattgttggggttagaggggtttgtgtttcgtagaggggagtttttcgttgtttgttgggtgagcgtttgtttaggaatggttgggttaggcggggtttttacggtgaggtattttggttcgtaatgggagtatttttgttagcggtgatagtatagcgtgtcgcgtatcgttatcggggagtgtagttgcggcggttttagatttttaggcggagcgggtggagggtggggattttttattgttttggttggggcgtttgagggatcggatttgggtttttttttggcggtgtggattttatttcgtatttcgtagttatttttggacgtttttatcgtttattgtatttaggttacgagaaatagtatagttgtgattaatatataagttgagggtattttgagttttttaggtttgtttagtttgtttgtggttagggaatgggtttttatatatatcgtaagtgttagtatttagcgtatttgtgtagtatttgggtatttgggcgtgaattcgttttttgaaatgttagttaggttcgggtattttttttgtggggttaagcggaaatttttgatggagagttttcggagatttgtagagaatgtcggtggcgttgttatggtttgcgggtgtcgttttttgggggtggtttatttttttaggtttagtttttttttggagatcgtttatttagggttttatagggatgtgtattgtggttgtgaggtttttttttgtttttaggtttataggggatagagggttattcgatgttgattttagaagaggtcggagttgcggatattgagatgtgtttttacggtattttttagtcgttgttgttttgggcgtgagtttgtttggtaggcgcgttttggagttttattgtcgtgttttttttaggtttagttgttcgagtgttgtgtggatgtggtgggcgttaacgttagttgtttaggcgtaagtttgtgtggtttaggtaagtcgttttgttttaagtagattttagatcggtttttgagttattggtgtgtgtgtgtttagggtttttttttcggtgataaggatagtgtttatttgtgttgcgggatttggggagtggatggggtagtgagggttgtggagtttggggaaggatatttgagttttttttttggcgggcggttttgagcggtagttttatgagaagattggtttagtagagggttgggagtagaggtaggagttgagattagaaaggtgtttggagaagggtttgggggagtggtttatgagtttagttatttttacggggttgttttggttttaggggtttttggtaaagtttaagatatttttgtttgttcgtgttcgggtagaggtgttgttggtttttggtgcgtggagtggaatgttaattaataggacgttacgaggatgtcggtttgtgttagcgtgttacgggtaggttttgtttattagaggttttgggaggttgcggaagggattgtttgggggtagttgggtgttaggaggttgaggttggtgagggtagttagtgggagtagttaggggaggggaggatagagtgagaaggtgtaagggttattttttggcggtttttggtgaatttggggttgagatgttttagttgtatttttaagggttttggtatttttattttgggggtttagtttttttatgatggaagaatttagaagggttgtttttggggatttaggggtttcgtgaggagggcgtggttaagacggcggttgtggtagttagtgaggttgggcgcgggggttcgaggttgggcgtgggggttggggagtttataggaaggtagtgatgatatttgaggtatacgtagggtaggaggaggagggtatcgttttgagggagaatagaggggttgggaggaagttgagtattttggggtttttatcgtttgatgttgaagttttggtggttgggtgagaattatttttttggtattttatggtagtaagagtgttggggtcgtggcgttttttgtgagggattgtgtattttaggtattttgtgggtgtaggtagttgtgtagtagttacggtgtttatggaggggttaggttagcgggtcgtgaagtttaagggtcgaggtggttttatgtataggcgtagggtggggatcgtttggcgcgcgtggggaggggtcgggtttgcggtgttggatacgtttttttttgcgtgcggttttaagttaggttacgttttcgttcggggaggtagcgggtatttttggggatagtgttgcgttggtgtttggttttttgtcgtggatttcgtttttcggttttcggggtagagatttttagatagagtttcgttgaagtcgttcgagttttgtgttaggagatgtcgggagatagaggttgtttttagtgttgggagagcgtagttttattttggtaggattgagcgggtggatttttatttttttaagaggtgtgtttgtagagtgatttttgttataatcgtgtcggggttttaggtttattttttatcgcggggttttcgtgtcgtcgcggttcgtttgtatttagattagtttgtgaggaagggtcgaggcgtgtggtttattcgtggttcgtattagtagtcgtatcgtagtcggtattaagagtgtgtttatttagttttgggttgagtgttggagatatttagaaagttaaggagtaaaagttaatttttgtttttaaaggcgttttggtcggtgggcggaaatgaggttttaggcgtagcgtcggtttggcggggggatgaggtttggttttgtaggatttttcgagagagattcgggggagggtgttagggtgtggaggtgatagatggattaagggtcgggattagtttggggtaggaggttgtgttgttggcgggtgggtttattttgtttgggcggtatgagggaatacggggtgcgaggtagtcgttttaggtattgtagatgggggttttgggggaggcgtggggggttttgggggaggtcgtgggggggttttggggaggcgtgggagggttttagggaggcgtggggaggtttcggggaggcgtgggggattttgggggaggtatgcgggggttttgtgggaggttatggggggggggttttgggggaggtcgttgggggattttaggagaggcgtggggggggttttgggggaggtttggggtaggcgttgtagtgggggtttttggggagtttgtggggtgaaggttgggtggtggaagtcgggtttagtttgtagttttgtagagtacgagtttttttaataggtttgtttattttggatgttgtcgtttattattttttgaagtacgtagtgtggagtatttagggtcggggtgtttagggtcggggtgttcggcgtggagtgtagcgtggagtattcggggttggggtgttcggcgtggagagtgtagcgtggagtattcggggtcggggtgttcggcgtggagagtgtagcgtggagtatttggggtcggagtatttagggttagggtgcgtagtgtggagtatttagcgtggggtgtttacggtttcgttatgttttttgggggtgtttttgtttgtcgtttatttattttttagagtatgttagtatttggaatgaaagttattttattaatttaaatagagaattatttttaggagatttagttggtgtggattttgttttggttgatatgttcgttttttgttttacgtaggttgttataggcgttggaacgcggacgggagcgttagttgcgttcgttgtgggaacggaatttttttagtttataacggtttcgagtgtagaagttgtaggtttgttcggtttttttcggttttttttttatagttttagttgtgggagatattgtgggagttgttgtttgtgtttttattttgttttagagttattgtttattggggaatagtttcgggagtttttttttttcgagtttgttgggttattcgggatagttttgtggtgagggttgtttcgtttttttagtttttcgtttttatattttcgttttgagatttttttagggtgtacgtgggtgttttcgtgggtttcgtgtatataggttttttatagttttgttattttatagttgttggttcgggtgcgttattttttatgaatagaagtttagggattttcgggcggttatattttggtaagttttagtaggttatagttatttttgtcggtgttttgggggttgggggtcgtcggagttagtgtagatttttatttttgacgtagttatagtaggtttagggttttgtaaaatagttagaggggagcgtggtagtttttgtagtttggggttagttggtgtgggtgggggatgtggggcgttatggggggttttgttatatttttaaagggtcgtagttaggggaggttttgatggttatatcgtatttttttagggttatatagtttatagttatacgtttttaggtttatatttatggtttacggttatatcgtacgtttttaggtttatatttaaggtttatatttacggtttacgttgatattatatatttttaggtttacgtttacggttatattgtacgtttttaggtttatatttacggttttgagttggtttgggtttattgttgatttgagtggtagtgttttagggtggggttggtttggatgggtttttggttttttgtggttttgtgttggggtaggaaggagcgaggtttttaagtttggtaaatacgtttgtgttttagggttggggagttttttttttagtattttagagtatatttagtagttattgttaattgtttcgagttttaggttagtagttttggtttgttttggtttaggtaggtggaggtgagtggggtgtaggagtatttgttgttagtttgaggttttgttttgtgtgggggttttagggtttgtgttgagttcggaggaaggaataaggttgagaattttttggtttttaggggtaattggaatcggagaggtgttttcgtagagttcggttagggttagtttttgtaacgtttttaatattcgagtttttgagagaagttgaggtcggggtaggtggtaatttttttagatttcgcggttagatgtttaggtatggttgagtttgtagggatgatttaggtttatgtgtagagttttcggtatttatagtcggtttcgtgaggtttaggtatgtttagagagtagcgtatttgttatgtgtagggggtatcgggggttaggcgaggagttagggttatcgttttgttcgtttgtttagcggtgtttgtttgtaggggtttcgcgcgtggtcgtttttttttttttgggtacgttttttattagtttcggttttatttttttcgtagttgggtttttttattttaagcgttttagtaaattttttagggtttgttatagaagaaataaaggtatttttcggattagtatttgttttacgggagggtatagggtaggcggtatttagtcgtggagatgggtttgagattggagtgttttaggttagagtaggttggtagaggtcgggagggagtagggtttgttttgtggtttttgggtttcggtgtgagaaggttcgttatttttcggaaatagtcgtgtgtggatttgaagggtcgaagtattaaggggtttttttcggggtttagaatttttgttggagttttttttcggtagaggcgttttttcggggtttttagggtattacgaggggcgagtggagcggggttgggtggttttcggtagttggatttgtttgggtttttttagtagttatggttttttttttttttttttggggttagggttggttaggttggtgtagggtttatattttagtttacgttacgtcgtatatacggttatttcgggtttgggtattgatttttttttattggagagacggttttgtgattgtggtgtttttaggcgggggcgggttttgagtagggttcgtggtgtttgttttcgttgtttagggtcggttttcgtagggtttttgttaggtagatggtttagttagtagttcggattttaaggtgagtatttggttagattgtgatagtcgagttggggtttttttttaggtttttgggtagttttatttggttgttgtgagatttttgtttattttttttaatttttttcggggttttagggtttagtttttagtcgggagttcgttgttagggttttttgtatagttaggtatcgagagattcggtttgtttagtatttttgtttatgggtatttttggagtagagtagggtttagggtttggttagttttggtggttacgggacgagaagttaggttggttacgatgttacggtatttttatcgcgggggtattatggaggtagaagtttacggtcgtggggtttaaagttatttcgtgtttgaggtttttttcgggagggtgggagggtagttttttttttgggattttggagtttggggagacgttttttatgaggggggtttgttttttttgttgaggcgggaaggtgggtttagggagcggggatttatttggggtgttagggaggttttcgtatttgtgagtgtttcggaggaatgtggtaggatcgagggttaggttgatgtatcgtagggagaggttgggggagattttgtagtttcggggtttttgttgtttcgaggacgtcgtattgggttgaggttgaggtagtttttcgttttgttgtttcggacgttgtattgggttgaggttgaggtagtttttgggttttagggtgatttttcgtttttttttttatagtttcggttttgtagtttggcgaagtcgtaagtaatttatattattcgggttgagcgtttttggtcgcgtgtgtttgtgttaggttatttcgagtttttattttgttttttttttttttttaaggttgtaatgattttttcgttatagtttttaggtaatagtagttgtcgtatttttttgtggggttttttatttttgggttagttttagggtgttttgtgggtttgtttttaaacgggtttgtttggttttggatttcggttatttttgttcgggtttttaggagatttatttataaggtagggttagggtcggatttggttggtgttttttgttttggattttagttggatttggtcggcgttttttgttcgtttttttttaattttcgtgatttttatgtttttttttgttttcgagacgtggggtttgtaggaaaggaggatttattacgatagggtagatttttaatatttgtttttttttgaagtttagttttattcgaggatagacgtagtcggttttcgttaggtttttttgagtagttatcgttttagtggtgttgggttaggcggatttaagagttagttcggttaggatttattttatgtgcggggttatagatataggttgagtgatcggcgtatagttatatagttttaaggttatgagtagggtttattcggttttcgtttttttgtgtagaagtttgttatgggggtaggtgatcgtgtttttaggggatagatcgttttttattaaggttggacgtgtttcgtttttaaagtagttttgtttgtaagtgtttagtagattttacggtgttcgagtgtttcggggttgttagttttaatagtagatttttaatttgattattttagagtttagaagtttaaaattaaggggtaaataaggttatacgtttttcgaggtttcggggaggacgttgtttgtttttttagtttttgtcggtttaggtatttgtggttgcgttgttcgtttttgttttttggttttacggcgttttttttatttttgcgttttttttttttgttttttttttaggtgggttttggtcgttgttttagggtttgttcggggaattttgggcgattatatttgagattttgacgtaattttttgtaaagtttttttttttaaataaggttatattcgaggttttgggattacggtttgtttgtcgttttttgaggtgtatgatattttgggatttatatttttgttttcggggatcgtttggtttttgtttaggtttcggggtttagggtgtaaatgagaggatatagtcgggtaggaggaagtcgtttttttttcgagttggagttttgagggcgttttaggggtagggggtatttgggtttttatttggttagagtaaatagtttcgggcgtttgtgttatatgtttattttcgagagttttcggtgagggttgaggtttgtattgtttttgttgtttaggttttattttgatttcgtttgtttttgattcgttttagtacggaagtcgcgttacgttaggcgggagcggtttttggatagggttacggatttcgttgttttttcgggggaggttcgtattagtaatgtttgatttggaggtcgagattacgttacgtatttggcggtagggattcggaggtcgattttttggcgggaattagtataaagtgttggtatcgttcggcgttcgggatagttttgggtatagtttcggttttgagttttttcgttttttagcgacggacgttaaagggtttcgggtcgtttgaggtttttttttattatagttatttcgtttatcggattaggagtaggtatttatgagattttagagttttagatcgaggttttggggggttcgggtttttttaggaaatacggtgaggttttagcgtttgtagttaaagttggtacgatttatggggtaggtgtcgttttgtttagaaaagttaggggttttgttgtcgtgttttttagagtttatagcgggtaggatttttttagtattattatatttagtggttcgagatttttttgagaatagtgaggttggttttcgtgtcgttttagtcggtgttcggttagtggggaggatatagtttaggaattagttgtttgagattagggtgtttttgggttgttttttcgcgtggcggagattttaagtacgtagttatttattttcggagttgtaggatagagtttttttttgatttttgtttttaagtagaaatttattgtgtagaaaagttttttagagttttgtggtttcgttcggattcgttggatttttatgtttggttgatttttgtttacgtggggtaggtttatatttaatttttataagttattgttttattgtatttgttaaggttgttttggcgttgagttttggggtttttttcggagtttttgggagaaaggcgtcgtcgtggtcgtttttcgtacgttaggttcgggttttatcgtgggttttagacgttttgcggtatcggtatcgtttgttttagtatgggatttttttttgaggggtggtttggttttcggggtttttacgtttttttgcgaagtttattgtgggtgttattatggttttcgggatttgggttagcgggaacgtgggggtattgggtgtgttgatataaagtcggtattatttaagttgcgtttcgagttgttttttttcgtaggatgttttgttttttaagtgtaggtcggggagtaaagttttcgttaggttggttttacgtatttcgttatcgtgtgttgggggtaaggaggtgggacgggggtggaggagagtttaggttggggttgtttggttgggatttttcgtttcgcgtcgtatattttttgttataggtttattttttagatgtaatttgtgtaggtgggatttgtggttttcgaatttttagttcggagtgaggtgggatagagtgtgggtgtgcgtttttatcggtcggtcgggttgcgtgggggttgtagatacgggtttcgggagggttgttatggttatttgggggggtagtagtgtgggggtgtttgttgatagtgatgggtttggttagagagggttgagttggggtaggataggttttgagggtagagggttcgggtattaggatgttagagcgcgggttttgttttcgtaatcgtgttttttatttaggtagaaacgtttattgtttggagggtcgtgtttttagatatttgtatttttgtttttaaaaatttttagtttgaggtttgtagttagggagtatttgggggagtattggttttgttttgggttttggtttaagaagtgttttggggttgggagggttattggttttggggagaaagggagggattggatagtttaaggttattttgagtttagtatttatcgttttatttgatgttttgggttacgtttttgtgacgcgggagtttttagattttttttgtggggaaggagatagggatcgagatgggagtagagggaaggagatagggatcgaggtgggggcggagggaaggagatagggatcgaggtgggggcggagggaaggagatagggatcgaggtgggggcggagggaaggagatagggatcgaggtgggggcggagggaaggagatagggatcgaggtgggggcggagggaaggagatagggatcgaggtgggggcggagggaaggagatagggatcgaggtgggggcggagggaaggagatagggatcgaggtgggggcggagggaaggagatagggatcgaggtgggggcggagggaaggagatagggatcgaggtgggggcggagggaaggagatagggatcgaggtgggggtggagggaaggagtttatatttttttggaaattttatttttgtatttgtattaggttgggcgtttggtttggaggataaaatcggaaataggtacgaa

SEQ ID NO: 157 - DNA, 4852 bp, Artificial Sequence
  chemically treated genomic DNA (Homo sapiens)
ttcggttgattgtaagttttgtttttcgggtttattttatttttttgttttagtttttcgagtagttgggattataggtttttgttattaggttcggttaaatttttttttttttttgagacggatttttattttgtcgttaggttggagtgtagtggcgcgatttcggtttattgtaagttttgttttttgggtttacgttatttttttgttttagtttttcgagtagttgggattataagcgttcgttattatgtttggttaattttttgtatttttagtagagacggggtttcgttatgttagttaggatggtttcgattttttgattttgtgattcgtttatttcggttttttagagtgttggggtaataggtacgagttacgacgtttagttttggatatatattttgaaaggtaatggggtgataaagagaggaagattgggttgggcgcggtggtttacgtttgtaattttagttttgggtggttgaggtgagcggattatgaggttaggagtttgagattagtttgattaatatggtgaaatttcgtttttattaaaaatataaaaattagttgggtatggtggtgtatgtttgtaattttagttattttggaggttgaggtaggagaatcgtttgaattcgggaggtggagaggttgtagtgggttgagattgtgttattgtattttagtttgggtaatagagtaagatttcgttttaaaaaaaaaaaaaaaaaagagtaagattgtagaagtggtatttgggtgtttgggtgggaggaattcgggagtttgatttttagatgtaagtttgaaatatttaggtcgggcgcggtggtttatatttgtaattttagtattttgggaggtcgaggcgggtagattacgaggttaggagatgagattattttgattaatatagtgaaattacgtttttattaaaaaatataaaaaattagttaggcgtagtggtaggcgtttgtagttttagttattggggaggttgaggtagaatggcgtgaattcgggaggagttcgtagtgagtcgagatcgtgttattgtattttagtattttagtttgggtaatagagtaagattttattttaaaaaaaagaaatatttattagatatttaattgggtatgtatattagatagttggatatatgattttggagttaggggatgagtttagaaagaaatataaattacggagttgttagcgtagagatggtgtagaaagttttgacgttgaaggttgggtatagtggtttatttttataattttagtattttgggacgtttaggtgggaggatcgtttgagcgagtttaatattagtttgggtaataaaggttggtattataaaggttcgtttttataaaaaaataaaaagttagttaggtgtggtagtttaagtttgttgttttagttatttaggagattgaggtgggaggattatttgagttttggaggttgaggttgtagtgaattataattgtgttattgtattttagttttggggatatagtaagattttagtgttataaatatataagttttgatatggaaagagattattatattttatgtgtttttttatttttgtttattttattatttggtgtttttaagtttaatattttttttgttgatttgaggttatatagtttggtgaaagagggtcggatttttggttttttaatatatttatatacgtttgtttaaaatttttagtgttttatgtttttagtttataaagtatagatatagttttaatgagaggtttttatattaggttagagaatgttagttttttttatttttatagagattttaaaaagtatattttagataaaaaagaaaaataagtaattaagattattttagggttgggtacggtggtttatatttgtaattttattattttgggaggtcgaggcgggcggattatttgaagtcgggagttttagattagtttgattaaggagaaattttgtttttattaaaaatataaaattagttgggcgtggtggcgcgtgattgtaattttagttattcgggaggttgaggtaggagaatcgtttgaatttcggaggcggaggttgtagtgagttgaattttattattgtattttagtttgggcgatagagtgagaattcgttttaaaaaaaaaaaacgttttttttataaggaattttgaggatttgttggtttaattgtttggatataaagatatatatatatgaagttggagagataggaagaagcgtttaatatagaatattttaagtatttttatttttttttaaggattaaatttttttagagattttttttgttttagttttttaggagtttttcgaagatgttaggagtcgtttaagaaggttggaagatggtcgttgggaaggaattgttggtagttggtaatattttattttaaggaggcggtggtaatagttttttgggtagtagatattatggatttttttttttttgggaattagaggttttttcgtttttggtttgaattttttagagataaagaattttatttttttttatattcgcgtgggattgttggggaggagagggggtggaggggttagatttttatttttatgaaatattcgcgggtttaaagaggagtttggattttgattggtttaggaggcgtgcggggtcgcggggttttttcggtttgggttaggcgcgttgttaagatgttcggggaaggggtcgttcggcgtaggtcggggacgtggagcgttcggggcgtttttacgtaggttatatattggtcgtttgtattttttttttttttttttaattttattttttcgcgtttttttttcggggagttttcgtttttttttttttttcgcggtcgttttcgttttttttttttttttagattttttttcggttcgtttttttttcggtagtttatttttatttcgttttttcgcgcgtttttcggttttcgttttttagtttcggttttttttcgtcggttttcggttttcgcggttttttttttgtttttttcgaggcggcggcggttttttttataatagcgcggttcgttttttttttttcggttttcggtgtattttcgttcgttttttttttcgcgtatgcgtttttcggttggcggcggttgcggcggtggcggttacgagcggtttcgtttttttaaagggaaacgttgaggcgtcgggggtgattgtgggggagggggatttcgagtcgcggagattttcgggagaggcgatagattttttttttcggagtaggagggttttgggcggatttagttttttatttttttttgaggaggaggggggggaaatggaggttcggggcggttgaggcgagtttcggggcggggggtcggggcggggaagggggggtgcggggtggggagacgaggcgggttcggtcgggttagggggggtcgaagcgagtttcggggatgagttcgggggcggttgggtgcgagtttttgtttttgaggcgaaggcggcggcggcggtagtagaggcggcggcgaggtttttatgggtcggcggcgggttttagtcgcggtttttacgttttcgtacgtcggcgggatggcgttcgggtttcggaggagtcgcgttagcggaggtttgttgtcgcgttgttgaggcgagttcgttaaatttttttttttttttttagttttcgatttttcgtatttcgttttttttttattttttttttcgtttcggtgttcggcgttgtttcggattattatgattatgagattcgcggtgtttaaggcggtcgcggtttttgtcggcggtaattttgagtagcgattggattacgagcgggttgcggcgttgggcgggttcgaggacgagtttggggcggtcgaagtttattttttttttcggtatcgtaagtttaaggagtcggggttttcgttggtttttttttagggcgggagtttcgcgtttttttcggtcggttgcggcggtaagggtcggggtttgttattttcggtcggggcggttttcgggtagtaggaagagagttggggcggttcggtgtttttgttttgttcgttttcggttattaagtaagtcggtattgggggggagtttgtcgtagtcggagtcggttgtagttttcggtttaagtattaggcggtgttgtttatttagacgggttttttcgtggcggcggttaaagagtttacgttttgggttggggataagggtggggcggtttttttcgttgttatcgtttcggattcggcgggatttttattattatttttgttcgggtcgttatttttcgcgtttatcgttatcgtcgggattttggcggttagcgagggtagatggaagagtatgaggaagagttttttcgggggtggtggcggttcgggagtttttagttaggtcgtttgttttaaatagatttttttgttgtaattggattttatcgaatagtagtagtagtagttgtaggttaaggaaaaggagatcgaggagttgaagttagagagagatacggtacgggaggggttaatttgtattcgggtcgaggagcgagttgtgcgtatgttcgggggaagggggttgtaggaggttaaggtattttcgggttaggggtaaaggaggttggttatcggtaaaggagtattttaggcgttgggtttttgggagttaggtttatagatacgttgggttggagggaagggttaaagggtaattttttagggggagggggaggggttttaggtgttaaagggttaatttaaaatgatagttttagacgtgtgggaaagacgtttagtggaaaaagacgtga

SEQ ID NO: 158 - DNA, 4852 bp, Artificial Sequence
  chemically treated genomic DNA (Homo sapiens)
ttacgtttttttttattaaacgttttttttatacgtttggggttgttattttaaattaattttttggtatttgaaatttttttttttttttttgagaggttgttttttaatttttttttttaatttaacgtgtttgtgagtttggtttttagagatttagcgtttaagatatttttttgtcggtggttaattttttttatttttaattcgggggtgttttaattttttatagtttttttttttcgagtatgcgtataattcgtttttcggttcgaatgtagattaatttttttcgtatcgtgtttttttttgattttagtttttcgatttttttttttttggtttgtagttgttgttgttgttgttcgatgaggtttaattgtagtagaaggatttgtttgaggtaggcggtttgattggaggttttcgagtcgttattattttcgagagggtttttttttatatttttttatttgttttcgttggtcgttagggtttcggcggtggcggtgggcgcgaggggtggcggttcgggtagaggtagtggtgggggtttcgtcgggttcgaggcggtggtagcgggggaggtcgttttatttttgtttttagtttagggcgtaggttttttggtcgtcgttacgagagagttcgtttgaatgggtagtatcgtttgatatttgggtcgggggttgtagtcggtttcggttgcggtaggtttttttttaatgtcggtttgtttggtggtcgggggcggatagggtaagggtatcgaatcgttttagttttttttttgttgttcgggggtcgtttcggtcgggagtaataagtttcggtttttgtcgtcgtagtcggtcggggaaggcgcggggttttcgttttgggaggaggttagcgggggtttcggttttttgagtttacggtgtcgggggaggaagtgggtttcggtcgttttaggttcgttttcgggttcgtttagcgtcgtagttcgttcgtagtttagtcgttgtttaggattgtcgtcggtaggggtcgcggtcgttttgaatatcgcggattttatggttatagtggttcggagtagcgtcgggtatcgaggcggaggagggggtggggaaggggcgaggtgcggggggtcgaggattgaggggggggaggggagtttggcgggttcgttttagtagcgcggtagtaggttttcgttagcgcggttttttcggggttcgggcgttatttcgtcggcgtgcggagacgtggaggtcgcggttgaggttcgtcgtcggtttatgggggtttcgtcgtcgtttttgttgtcgtcgtcgtcgttttcgttttagaggtaggagttcgtatttagtcgttttcgagtttattttcggagttcgtttcggttttttttggttcggtcgggttcgtttcgtttttttatttcgtattttttttttttcgtttcggtttttcgtttcggagttcgttttaatcgtttcgagtttttatttttttttttttttttttaggagggggtggagggttgggttcgtttaaagtttttttatttcgggagagggggtttgtcgtttttttcgggggttttcgcggttcggggttttttttttttatagttattttcggcgttttagcgtttttttttaaaaaaacggagtcgttcgtagtcgttatcgtcgtagtcgtcgttaatcggaggacgtatgcgcggggaggggagcgggcgggagtgtatcgggagtcgagaggagggaggcgggtcgcgttattgtgaaaggggtcgtcgtcgtttcgaggggggtagggaggggatcgcgggggtcgggggtcggcgaggggaggtcggggttgaggggcgaggatcgaggagcgcgcggaggagcggggtgaaggtgggttgtcgagggaggggcgagtcgggggagggtttggagggggaagaagggcgagggcggtcgcgggaagaaggggaaagcggaggtttttcgggaaaaaagcgcgagagaatggagttgagaggaaagaaggaggatataggcggttaatgtgtggtttacgtgggagcgtttcgagcgttttacgttttcggtttgcgtcgggcggtttttttttcgggtattttggtaacgcgtttggtttaagtcggaggggtttcgcggtttcgtacgttttttggattagttaggatttaggtttttttttgagttcgcgggtgttttatgggggtagaagtttaatttttttatttttttttttttttagtagttttacgcgggtatgggagagaatgaagttttttgtttttaagggatttaaattagaaacggagggatttttggtttttagagggaggaaaatttatgatgtttgttgtttagggagttattgttatcgtttttttgggatgaagtattgttagttattaatagtttttttttaacggttattttttagtttttttaaacgatttttagtattttcgggaggtttttgaaggattgaagtaaaggaaatttttgaagggatttagtttttgaaagggagtagggatatttagggtgttttgtgttgagcgtttttttttatttttttagttttatgtatgtgtgtttttatgtttaagtaattgagttaataagtttttagaattttttgtgaaaaaaacgttttttttttttgagacggatttttattttgtcgtttaggttggagtgtaatggtgaaatttagtttattgtaattttcgttttcggggtttaagcgatttttttgttttagtttttcgagtagttgggattatagttacgcgttattacgtttagttaattttgtatttttagtagagataggatttttttttggttaggttggtttggaattttcgattttaggtgattcgttcgtttcggttttttaaagtggtgggattataggtgtgagttatcgtgtttagttttgaaatagttttaattgtttgttttttttttttgtttgaggtgtgttttttaaaatttttatggagatggagaagattgatattttttggtttgatgtgaaaattttttattaaaattgtgtttgtgttttgtgggttgaaagtatgaaatattggaaattttaaataaacgtatgtgaatgtgttaagaagttaagagttcggtttttttttattagattgtatggttttagattagtaagggaagtattgagtttagggatattaagtaatggagtgagtagggatgagagggtatatagaatgtggtgatttttttttatgttaaggtttgtgtgtttgtggtattggggttttgttgtgtttttaaggttagagtatagtggtataattatggtttattgtagttttaatttttagggtttaagtgatttttttattttagttttttaagtagttgggataataggtttgggttgttatatttggttaattttttatttttttgtagagacgggtttttgtaatattagtttttgttgtttaggttggtattgaattcgtttaagcgatttttttatttgggcgttttaaagtgttgggattataggagtgagttattgtgtttagtttttagcgttaagattttttgtattatttttacgttgatagtttcgtaatttatatttttttttggatttattttttaattttagaattatatatttaattgtttagtatatatatttagttggatgtttaataggtattttttttttttgaggtggagttttgttttgttgtttaggttggagtgttggagtgtagtggtacgatttcggtttattgcgagtttttttcgggtttacgttattttgttttagtttttttagtagttgggattataggcgtttgttattacgtttggttaattttttgtattttttagtagagacgtggttttattgtgttagttaggatggttttattttttgatttcgtgatttgttcgtttcggttttttagagtgttgggattataggtgtgaattatcgcgttcggtttaggtattttaaatttatatttaaaaattaagttttcgaattttttttatttaaatatttaaatattatttttatagttttatttttttttttttttttttttgagacggagttttgttttgttgtttaggttggagtgtagtggtataattttagtttattgtaatttttttatttttcgggtttaagcgatttttttgttttagtttttagagtagttgggattataggtatgtattattatgtttagttaatttttgtatttttagtagagacggggttttattatgttggttaggttggttttaaatttttgattttatgattcgtttattttagttatttaaagttgggattataggcgtaagttatcgcgtttagtttagtttttttttttttgttattttattgttttttaaaatgtatgtttaaggttggacgtcgtggttcgtgtttgttattttagtattttgggaggtcgaggtgggcggattataaggttaggagatcgagattattttggttaatatggcgaaatttcgtttttattaaaaatataaaaaattagttaagtatggtggcgggcgtttgtagttttagttattcgggaggttgaggtaggagaatggcgtgaatttaggaggtagagtttgtagtgagtcgagatcgcgttattgtattttagtttggcgatagagtgagagttcgttttaaaaaaaaaaaaaaatttagtcgagtttggtggtaggggtttgtagttttagttattcgggaggttgaggtaggagaatggggtgaattcgggaggtagagtttgtagttagtcgag

SEQ ID NO: 159 - DNA, 2519 bp, Artificial Sequence
  chemically treated genomic DNA (Homo sapiens)
tatgtaacgttggattttaaatcggttttaatttttaaaaagtttataggtacggatataaatttttagttttcgtggttgtggtcgttttatgtattttttttagtggtggatataaacgttaatgtatttgttattatttaaggatataaaaatatagaaggtggtatttttcgttttttttttcgaagattttttttagagttgttagatgaacgtttacgttatttttttttattaaaggtggatttagttaataggagattggatcgcgattatagcgcgtttgtgtttagttttggggaaagttttatgttagcgagtggttttcggttcgtttcgtagatcggttaagtacgcggaggtcgcgcggttttattattaatatttttgaaggataatagtttattaagttttatcgaaagtttcggattcgtcgcggagtttgggttggcgggggatgaggttgagtaattttttttagaggtggttatgtggagaaggagtaattttttttttttttttttttttttttcgttattattcgcggtttagagaattgtcgtttgtcgttattgatacgtatagatagaatttaaagaaaggtaaagagttttgttcggtatcggcgtcgcgtgggttaaatttgcgttcgtggaggggcgcgtagagggtatcgggcgtcgggagtaggcggcgtagtattaggtgagttcgttatggcgatggtattattgtttagggtgtttcggggtttggaaataaaacgcgtcgtcggggtagtgtaggggtcggagagaattatttttgtttttttttcgagtttttgcgggcgtattttcgatagtcgatttattttttgtaaaaataaatttttaaatttagttgtttaatttgtttttttgggcgataaagggggggttgttaaagaagtggttaaatttttgcggttagcgaggggtcgggggcgtcgagggtattgagaggggaaggaggagggatgcgaggtttagtagcgggttttaggcgaggttggattcggaggaagcggaggttttttgggaatgcggagtttcgggcgtaggagcgggaggacggaggcgttcggtcgtcgatgggtacggggcgatgggtggggggttgcgtagggttcgagggagttcggggagggtcgttcgggggtttttgaaggtgttcgggtagggcgtcggcggttttaggttgataatggagggggcgcggagtagtcgggcggaggttagggattcgagttcgggggcgggtcgcgtcggggaaggttaggtcggggacgtcgggtggcggggcgagggttgggggttgttgcgcggatattcgggcgtcgcgggcgggcgtgcgtttcggggtcggcgcggaagagggcgcgaggtcgggtattttttttcggtttttttttcggggcgttcggtgtcgacgcgcgttgcgtttttatcgggaaatggcggttcggtcgtggttcgtttgggtagtttggttttcgttttgcgcgggaaaaaataataataataaaaatatcgaaaaagggaataaaagtaaattggttgcggcgtaggaaagggttttgtcgggcgtcggacgtcgtgcgtatcgttcgcggggcgcggcggttggggattagttttgtttttttcggtttttagtttttagtttcggcgtattttagttttagttcggttagtttttcggatcgttcgtgggtgttttttttcgtttttttttgggggggcgtttttagtttttgttttttttgttttttataataatggttaaaggggtattggttttttaagggttaaacgagttttttttaggagtttttcgtcgcgtgtagtggattatcgtgggtttgattgaggtttggtttttgttagggttttttggtaacggttttggatgagtgaagggatgaaaggcgcgagaagaaatgggttgagaaattaaagtgcggggttttgagtgtttgaggggacgcgatgggaatcgtggtttcgttgttttgattttaagggtagttattttgttatagttacgttggaattgaggtgtttttttagtttttgtttattttagaggaatttaaaataagggtttagttttaagttttatagattttaggattttttaggggttattagtttatcgcggtaaatggtttttttattttgtttatttgtgtttgttttgaaatttaattgttattttattgggttgtatagttgttattgaaacggtttaataggtgagagaaaaagaaaatattattaagagcgagaacgtgttttcgtgtgtgttgttttgaattataaattaagttatatataatttttaattcgttttaatatattttttatttttaaattaaatgttaagagttttaagatttggaaatatattggtgatttttagaattgttttagtttaaaattatatataaataaatagaggtattgttcggcggaaaagtttattttgagtcgtat

SEQ ID NO: 160 - DNA, 2519 bp, Artificial Sequence
  chemically treated genomic DNA (Homo sapiens)
atgcgatttaagataaattttttcgtcgggtagtgtttttatttatttatatgtaattttaggttaaaataattttaaaaattattagtatgtttttaaattttggagtttttaatatttagtttgaaaataaaaagtgtgttaaaacggattgagaattatgtgtagtttagtttgtggtttaaaataatatatacgaagatacgttttcgtttttaataatgtttttttttttttttatttattgaatcgttttagtagtaattgtgtagtttagtgaggtgataattggattttaaaataaatataaatgagtaaagtgaggaaattatttgtcgcggtggattaatggtttttaggggattttggggtttgtggggtttagaattgggtttttgttttgaatttttttgaggtggatagaagttggaaggatattttagttttagcgtggttgtgatagggtaattgtttttaaaattagggtagcggagttacggtttttatcgcgtttttttaaatatttagggtttcgtattttggttttttagtttattttttttcgcgttttttatttttttatttatttagggtcgttgttaaaaaattttggtaaggattaggttttagttaggtttacggtggtttattgtacgcgacgggaaatttttggaggaagttcgtttggtttttggggaattaatgtttttttggttattgttgtaaggaataaagagggtaagaattgagggcgtttttttaaggaaaggcgggggaggatatttacgggcgattcggggggttggtcgggttggggttgaggtgcgtcggggttggaggttgggagtcgggggaggtagggttggtttttaatcgtcgcgtttcgcgagcgatacgtacggcgttcggcgttcggtagagtttttttttgcgtcgtagttagtttatttttattttttttttcgatatttttattattattattttttttcgcgtaaagcgggagttagattgtttaggcgagttacggtcgggtcgttatttttcggtgaaagcgtagcgcgcgtcggtatcgggcgtttcggaaagggaatcgaaggggagtgttcggtttcgcgttttttttcgcgtcggtttcggggcgtacgttcgttcgcggcgttcgggtgttcgcgtagtaatttttagttttcgtttcgttattcggcgttttcgatttgatttttttcggcgcggttcgttttcggattcgggtttttaattttcgttcggttgtttcgcgttttttttattgttagtttggagtcgtcggcgttttgttcgggtatttttagaggttttcgagcggtttttttcgggttttttcgggttttgcgtagttttttatttatcgtttcgtgtttatcggcggtcgggcgttttcgttttttcgtttttgcgttcgaaatttcgtatttttaggagattttcgtttttttcgggtttagtttcgtttggggttcgttgttgaatttcgtattttttttttttttttttttagtattttcgacgttttcggtttttcgttggtcgtaggaatttgattatttttttagtagttttttttttatcgtttaaggaagtaagttgggtagttggatttaagaatttgtttttgtagagggtgggtcggttatcgagggtgcgttcgtaggggttcgggggagaggtagaggtggtttttttcggtttttgtattgtttcggcggcgcgttttgtttttagatttcggagtattttaaataataatgttatcgttatggcgggtttatttggtgttgcgtcgtttgttttcggcgttcggtgttttttgcgcgtttttttacgggcgtaggtttggtttacgcggcgtcggtgtcgggtaggattttttgtttttttttgggttttatttgtgcgtgttaatggcggtaagcggtagttttttgggtcgcggatagtagcggggggaggaggaggagggagaagggattgttttttttttatataattatttttaggaggagttgtttagttttatttttcgttagtttaggtttcgcgacgggttcggggttttcggtggggtttgatgagttattgttttttaggagtattaatggtgaaatcgcgcggttttcgcgtatttggtcgatttgcgagacgagtcgagggttattcgttaatatgaggttttttttagaattgggtataaacgcgttatggtcgcgatttagttttttgttagttggatttatttttggtgggagaaggtggcgtgggcgtttatttggtagttttggggagagttttcgaaggggaaagcgaaaaatgttattttttatatttttgtgtttttaaataataataagtatattaacgtttgtgtttattattgggaagagtgtatagggcggttatagttacgagagttgagaatttatattcgtgtttgtaggttttttagaaattaagatcgatttagaatttagcgttgtata

SEQ ID NO: 161 - DNA, 9783 bp, Artificial Sequence
  chemically treated genomic DNA (Homo sapiens)
ggttatattagatttttttttaatcgtttttttgaatttttagatgatttagagcggtcggttgattttgtcggtttattttatatttagggaaggaattcgttttggagatattaagagatattgtatttttaattttaaaattagagtgagggcgggattcggtttcgggattttagttttaaattttaggatatttttttttggttcgagtatgaagaaggaggatttttaattttattttttttttttttttttttttttatatatatatatatatatatatatatatatatattatatatatatatatatatatatatatatatatatatatatatatatatatatatatatatatatatatatatagagttggatttttttttattttttttatttttaatataagcgggttttaggaatcgtttagggcggcgtttagattttgtcgagtagtggtaggttttaatggttatatttcgtttttattttcgttatattttttttttggtttggaggaatttttattttattttattttaggttttttgcggtcgtttattttgggggttggggcgtttgagttgaagttttttcgtttttcgttcggcggggtaggtttcgggaagttgggaggagaagggaaggggtttcgattcggattttaggaggttagagtttttgtcggtaggttcgggttttttcgttgtagttcggggaggggtcgacgcggttcgattatcgtttagttcggatgtcgatttcgtttggagggaacggggtttacgtttaggtcgaagttttttttcgtacgggtttcgattttcgggttagcgaggaagggaaagtgtttttttggggacgagtttttaagacgttttatcgttcgtagtttcggtttagggtatttttcgtttcgtcgtttttagttgcgcggtcggtgtcggaggtttagattgattttagggtttcgtttcgtttttttttagcgtcgcggcggggagggcgggttcggtagggggagggtcggtcgggggcggtttttggttcggttcgtttcggtttcgcgtagggtcgtagcgcggcggtttttttcgtagaaaaaaaattgggggttaggggcgtttatttttttaggtcggggagagttacggggagatttttggattgcggaggagtcgggcgagcggggggagtacgattcgggtggatttagattttgtttagtttttaattttttaggggaggatcggcgtcgggaaagttaagaggtgttcggggtggggttaggaagggtcgttgttgtttttttgtggttaagcggttattcgtttttgttgtatttgggatttcgcgggaagcgggattgggaaagggtattcgtcgggaggttttagggttcggcgcgggtgtgttggttggggggagatgtttatttttttgtttttaggatcgtatagtttaacgttattttttaaatttgaagattttttagagtcgtttagatttagattatcgtttttttttataattcgtttttttttttgggtttggaatttttaggagtttaatttttatttattttttaaagggtgcgtttagaaatgtttttggattttagttgtgaattttgtttttatttttaggtttgatttggcgtataggatatttatttatacgcgtattttttttttttgtaagggagttgaggaggtgggagtagaatgaggacgtttattaatattttattggtttgtgtttgggatattatatagtttaatttttttaatatttattatagatttttggggaaaatatatttatttttttttgtttatagagaagttgaggtttagagaaattaagtggtttatataattgtttttgatttgtgatagtaagaatttatatagtcgggtttgtttggttttaaattggtggtttggttttgttattttacgggtttttttagtttgttttttttttcgttgtttagtagagtgagtggtatataataggttgttaataaatatttgatgaatgaatgaatgttaggagttatatagattttaaatatttgaagtgtaatttagatatttgataaatgtgaaaataggttcgtagtagtttggttttaggttttttaattgatttaatgaatatttttcgagggtgaattgagagttatgttcggaagatttatttttgtttttaaataatttagagtttaaatgaggaatgtaattttaagatagttaatatttattgaatttatattatatggatttgggtttatatatattaattataagaattttatgaggtagttatttttattttattgagaagtaaattgaggtttagagaggttatagagttagtgttgggtttgatattagaatttaaatagttgaattttagagtttttgtttttaatttttattttttattgatttttaatgtagatagttataatatcggaggttattgttgtagtgtgggtatgtgtgggttgtgcgatatttagttttgaataataggtgaagtttttaagataaggtgatgtgtagatttttttaattttaatttttttttgagataaggtttttgttgtttaagtgtgtagtggtaagattttagtttattgtagttttaattttttaggttttaatgatttttttattttagtttttttagtagttgagattataggcgtgtattattatatttaatttttgtattttttgtatagatgaggttttgttatattgtttaggttggtgaggggttttttttaattattttgtttatttttatttttgttttttttaatttattttgggtttaatttgttgttttttttttagttttttaaggtggaaatagattattgatttgagatttttatttttttttattataagtaatatttttaatttttttggatgtttaattgttttttataggtatttattattatatttagttaattttttatttttttgtagagatggggttttattattgtttagggtggttttaaatttttgggtttagtagtttttttatttttgttttttaaagtgttgggattataggcgtgaattatcgtgtttagtagtagattttgaataagttggagttattaaaagtttatagttatgtaaattttaggaagttggtggtggtggtaaaaaatgaagttggagaaggaagtagtggttggattatgaaggtttttatatgttatgtataggagttgagtgttgattttgttttaggcgtaataaggagttattaaatttaggaggttaatatagtaaaaggtggtggtgattgaaggcggggagagatggagataagtagagaaatatttttaaaggtttatagttaataatatttagtgattaattattttgatgagaaagaaatgaaagttaagggtgattaattttaagatttttaattggagtagtagagttggtgtttattgaggggatatattaggagaaggaatatgttatggagggtagtcgtgaatttagtttgaggtatttgaattgaagtgttagtaggttatttaggagatattcgggagatgattggtatgtgtgggtttaaagtttaggaagggtttgggtagatgggtgaggttatagaagtggatgatgatatttatagtaaatgcgtggagtggaaagagtgggggtggaataaagaatttgggggatattatatttttagaattgttttggtgttttttttattattttatagagttttttttttattttttagtttttagttaaagtaaatatagatatatatttttatttatttcgtttatttgttaatagttgtaattttggatatagcggatattttttttttagttaagttgttattaaagaagggttagggagataattttagaatttgggttgtgagaggagtaagtatggagaggttagtgggagggatggtgtttagttttttaggagtaattgtttggtttttttagggggatgacgaagatagagatgttattttcggaatttagtttgttgttggggagacgttagttacggtttcggggggtatttcgggtttttaggattagagtttgggttagagttgtatatttgttaggagtatatatgtatatttatgtattaatatgtatgtgggaagatagatatataggtttatatgtggggttttaagtattgtttttttttgattttttttttattaatgttatttttttattattatgttatgtagtttttatttgttgtggttattaggtttataggtcgatagtattttgtttatagtggtagttattttatagttagtagtgatattttataggttatttgtttttaggattagtatattatttgggtagtgtttatattgtgttaggttatatattcgtatttggtgggagaaaagggtagagaggattgaggtgtggggtttgttggatagggagtttggagataaagggattgtagatgaaagttggtttgagatttttagagaaggtaaggtgtggtttaaggggtttattttagggaagtaggagagaaagggtttgatgggtagggtggaattgtagattttaaggttgtggttttttaagtttcgggttattttaatggtggttattattcgagtttgaaagaaatgaggagggagtgttattgtagttttttgttagattttttgaaattaaagattttttttatttttatttttaggtagaatttttatttttttagataagttgtgataggtttttttttttttttttatttttattatggagtttatttttttgttttttttatagattagaggaaatttgagattttttagttcgatttttttgtaggttttggggaggggggagtagaggaggtattatttaggtattaaagttttttttttttaggagttgtatatttttatataaattttttagaagggttatatttttttaatttttagtttttagtttttattttgttgcgggcgagggattggttgtgttgttatgggaacgggttttagttttgagggaagtgttattagtcggttatgttttggtttcggtataatattttttgttttagttttttgggtagaattttgcgggggaatttaaggtgggtgaatttattgtttagtagttttggttttaggaagttttggagttggggatgattagaatagagagttagggggtattatgtttatagtatacggtggtatatagatgacgttgattatagtagatttttaaatagagtttattatgtgttatacgttattttaatattagtaaatattaatttatttattttttataatagtttttaaggtaggaattattgatgtatagagaggttaagggagggaattgtttcggttatataattagtaaagtatttagattaggatgtatttcgggtttttagttttatagttatatgcgtttaggtattaagtcggattgttttttaggggtttttgttgttttttttttttattttagtttttattttttgttttagttggggttatagtgggagtattggattagtttagtgttgtagtttttttgttgtaattttttatcggtttagtttcgtattttatagtttatatagcggtttttttagtaaagtgttttttgtgtttgtggtgggggtgtgagagtttttagggttatggggtgtagggaggtataagattcgataaagaatgggggtagggaatttggtttttatttataagtagttgaagacgttggcgtttagttttcggggtaaattttcgggatattggaatgattttattatttcggataatgatggttttgtttaaagaaagaaaaggaattgggatttggttttttttagatttatttatgaaaaattttagaaagattaggttttttttataatgattttttagattttttatttagatttttatatttgtttttgattttatttaatggatattttaggttattttttatgtttgttattttttttgattttttttaattttgatttttaatttttgttattttatttttttgtatttttttaatttagagagtgtggttttttgtcgttattttggagtttttttttttatatttgttatcgtttgtattggttacgtatattttgtttagtaggtagattataattagtgtatagtagtttttttttatttggtggttacgtcgttttcgggttatttgtttattttgttatataaggaagggttagaggtgggtagaaggagaggttttattatatagttattttttttttattttttttattcgtagaaattaattggtttagttaggttatattggaagataggagggaagattggggtgtaattgtttttttttttttttttttgaattaagttttgtttaggtttttaaaggtgttgtgggtttttagggtaattttttttggtttttatatagagttggttagagtggttgtttagtaggtttttggtttaggttatttatttattatgagttggaaggtatttttaacggtttttattattaggttttcgtggtttatttttttttgtgaagattagtaggattgagggttaagtaagtgagagggatcggaggaatttggggttttcggagtggttgggaggtagaggggtggtggcgaagggttttgaagtatttttattaggttttttagttgttttcggatatggcgatgtaggagtcgtgaggttattttagtagtttcgttttttgtatgtttattaaataggttttagtagtagaagtagagtttttggtggaggaaaagttggaggtgagttttgtttgtgtgtgtgtgtgtgtgtgtgtgtgtgtgtgttatgtaaggtgaataataagattttgggtatttatataaatatttgagaggttagtgtttgttattgaaggtaaattaggtttatttatataaggtttcgtatgtgttaagagaaaggaaaggtttaaaaatttaaatttagaggataatagatttaaaatttagtattggtaattaaattatttataaatatgtgagtttttatattttaggtgggaaagtaatatttatgtttatatggtagaatttaattgatgaatattaggtaaaggttttgtgttagaaggtagatagttagtgagtttattaggtttttcgtatggtttagatttaaaattagaggtttgagtttttggggagaggtgttattgtgtttttgggaaaggggatgggttttatttggtttcggttaggttttttaggtatttttgtaatattttttcgattttttatatatattattttatagtaagtttggtttttattgtgtcgatttttgttagtattgatgattttgttaggttagaatgattatattaggttggatattagattaggttttggaataatttttattttagatatatatcgttttttgcgttcgttggttaagttgagaaaggttatagttatttgggatttaggttagagggaggaggagaagggagggttggtaaggtgtaatgagtattgtttgggtggttagttttattattttatagaaaggttattaggattttttggttaatcgttatgttttttgtttgttttattttttttatttttggtaaaaaaaaaagaaaaaagaaaaaggtatttttagtggtgtttttgggggaggggttagttggtagtagaagttttatttttttgttagttagattttatattttatttttaattattattaatttttttagtgttttgtttttagtattttatttttatgggtatatttatttttattttaaaattatttagcgaaagtttttgttgttttaataatgaggaagttttttagtttagatcgggaaagaggaattgaaatagagtagaagtgaaagtttatttggattgggtaggagttatatatttataaattttttttatataggaggttaagggaggtggtggtgggtttatgggttattagttattttttttagcgaattgagcgtttttatttttttcggtgttttgcgttttcggtagatgtatttaaaatatatatagttcgggggttagtcggtcgtttcgggtagggggttcgtttttttgttaggttagtacgagttggtaggttgaagggtatttaaatgggatttttttttatttcgggcgttttttttttcgtttttggggaagttggcggttttttggtgtcgcgggttatttttgggtgtggagggggaggggaattacggtaagagggatagggaattggggcgttggagtcgggaagcgggtgagcgagtttttttaatcgttatgttttttattaaaaagaatttcgttttttcgtgaaatttttttttttttagtttttaagttgtcgggtcgcgacggggaattggttaatttatttttcgtcgggtttttcgtttttcgggttttggggtagaatagggttttgaggcggcgtgggcgagggtagttaatgagcgggaaggacgtgaagaaggtgatataggttgttttttattggaaaatgggttgggagggggtgcggttcgaagattagaggatagtaaaggtttacggaaaagggagtttttggttcggacgcggcgtggggaacgcgttttagcgtcggggatgcggagttggggagaggggtgggagttttattttggtttgggtgttttagggggcgtttattcggcgtagtttgtgttttagggtaggcggcggttcgtgttcggggggttttgtatagttcggttcgcgtggttatcggcgcgtcgtagtttttcggggtttagttgtaaaaaggtcggtttggagaagttcgttcgagttttaatagttttcgcgggcgtcgcgttttcgtttttaattttcgcgggagggtttttgggcgtttttggagcggcggcgggcggcgtcgaggcggcgttgggtaggttcggggatttggggcgcggaggcggagcgttttcggagtttattaggtgcgttacggtcgagcgtattcggtttagtatgttgtttttttgtttcgttttcggtcgcggtttcgttttcgtttaggtttcgtttttatggtttcgcgtgggcggtgttcgcgttagtcggtttttttttgttattggttttcggttagttgggcgggtttcgggcgaaatttgtttttgttttgggttattttaggaatcggtttacgggttttcggtttttgtttcgttttatttcggtttggtttcgttttcgttttttaggggtaggttttgttgttgtgagaagggggcggagagaaggaaattttattttagtcgtgcgttagattagatatagttagaatgtttttattgtgacgggggttgagggataagggggtgcggttttttcgttttcggttcggtgtggttagttagtttagagagttatggagttaatgattttagagtaaaataggcgtttgggagtcgttgggtatgaggcgttaggtgtgatattatttttggatggggttgttggagcgagagcgggtaagttggtatcgggtggggttgcgggattaatgacgtaggttgtagtcgattatttcggaattaggagtcggggtagatttttgggtttttgatgcgttgtttttcgtgaagattatttttagatttgggagagcggttgt

SEQ ID NO: 162 - DNA, 9783 bp, Artificial Sequence
  chemically treated genomic DNA (Homo sapiens)
gtaatcgtttttttagatttagaggtggtttttacggggaatagcgtattaggagtttaggaatttatttcggtttttgatttcggggtggtcggttgtagtttgcgttattaatttcgtaattttattcggtattagtttgttcgttttcgttttagtagttttatttagaggtggtgttatatttggcgttttatatttagcggtttttaagcgtttgttttgttttgaggttattagttttatggttttttgggttggttggttatatcgaatcgagagcgaggagatcgtatttttttgttttttagttttcgttataatggagatattttagttgtgtttaatttagcgtacggttgaaataaagttttttttttttcgttttttttttatagtaatagaatttatttttaagaaacggaggcggggttaagtcggaatggggcggggtagaggtcggggattcgtgggtcggtttttggggtggtttagagtaagggtaagtttcgttcgggattcgtttagttggtcgggagttagtagtagggaagggtcggttggcgcgagtatcgtttacgcggagttatgggggcggggtttgggcgggggcggggtcgcggtcgagggcggggtagggaggtagtatgttaaatcgggtgcgttcggtcgtggcgtatttggtgagtttcgggggcgtttcgttttcgcgttttaaattttcggatttgtttaacgtcgtttcggcgtcgttcgtcgtcgttttagaagcgtttaggagttttttcgcgaaggttgggagcgggagcgcgacgttcgcgaaggttgttgaggttcgagcgagtttttttagatcgatttttttgtagttgagtttcggggggttgcgacgcgtcgatgattacgcgggtcgggttgtgtaaagtttttcggatacgggtcgtcgtttgttttggagtataggttacgtcgagtgagcgttttttggggtatttaaattaggatggggtttttatttttttttttagtttcgtattttcggcgttaggacgcgttttttacgtcgcgttcgggttaggagttttttttttcgtggatttttgttattttttggttttcgggtcgtatttttttttaatttattttttagtggggggtagtttgtgttattttttttacgtttttttcgtttattgattgttttcgtttacgtcgttttaggattttgttttgttttagagttcggagggcggagagttcggcgaaggatgagttggttagtttttcgtcgcggttcggtagtttaaaggttaagggaaaaggggttttacgaaggagcggggttttttttaataggggatatagcggttgggaagattcgtttattcgtttttcggttttagcgttttagttttttgttttttttatcgtagtttttttttttttttatatttagaaatagttcgcgatattaggaggtcgttagtttttttaggagcggggagggggacgttcggggtagaggagggttttatttagatgttttttagtttgttaattcgtgttggtttggtaaagaagcggattttttgttcggagcggtcggttggttttcgggttgtgtgtattttaaatgtatttgtcgggaacgtagagtatcgagggagatgggggcgtttagttcgttgaggaaggtggttggtggtttatggatttattattattttttttagttttttgtgtgggaggagtttatgggtatgtggtttttgtttagtttaggtgggtttttatttttattttattttagtttttttttttcgatttgggttggagagtttttttattgttaaggtagtagaaattttcgttggatggttttaggataagggtgggtgtgtttatgaggatgaggtgttggggataaggtattgggagagttgatagtggttgagggtgggatgtagggtttagttagtagggaagtaaaatttttgttattaattagttttttttttagaagtattattaggaatgtttttttttttttttttttttttttgttagggatgggggaagtgaggtaggtaggggatatagcggttggttagaaggttttggtggtttttttgtgaagtggtagggttggttatttaaatagtatttattatattttgttagtttttttttttttttttttttttggtttggattttaggtggttgtgattttttttagtttggttagcgggcgtaggagacggtgtgtgtttaaggtgggggttattttaggatttggtttggtgtttaatttgatgtggttattttggtttggtagggttattaatgttggtaagagtcggtataatgaggattaggtttgttgtgaagtggtgtatgtggaaggtcggaggagtgttataggagtatttagggagtttagtcgaggttaggtaagatttatttttttttttagagatatagtgatatttttttttagggatttaggtttttggttttaaatttgagttatgcggaagatttgatgaatttattggttatttattttttggtatagaatttttatttggtatttattagttagattttattatgtaagtatgaatgttatttttttatttaaaatgtagaggtttatatatttatggatgatttaattgttagtgttgagttttggatttgttattttttgagtttgggtttttgagtttttttttttttttgatatatacgaagttttatgtgaataaatttaatttgtttttagtagtaaatattgattttttagatgtttgtatggatgtttagagttttgttatttattttgtataatatatatatatatatatatatatatatatataaataaaatttatttttaattttttttttattagggattttgtttttattattggggtttatttgatgggtatgtagggggcggagttgttgaaatggttttacggtttttgtatcgttatattcgagagtagttaaaggatttggtagagatattttaggatttttcgttattatttttttgttttttaattatttcggggattttagattttttcgattttttttatttgtttggtttttagttttgttggtttttatagaaggaagtgagttacgagagtttggtagtgggggtcgttgagaatgttttttagtttatggtgagtgggtgatttgggttaagagtttgttaggtaattattttggttaattttgtgtggaagttagagggggttattttgagaatttataatatttttgagagtttgagtagagtttggtttagaggggagggagaaggggtagttatattttagtttttttttttgttttttagtgtagtttggttgggttagttgatttttacgggtggagggggtagggggagggtgattgtgtgatggaatttttttttttatttatttttgatttttttttatgtggtaggatgagtagatggttcgggagcggcgtggttattaagtggaggggggttgttgtgtattggttgtgatttatttgttaggtaaggtgtacgtggttaatgtaggcgatagtaggtatgggggagggggttttaaggtggcgatagagggttatattttttgagttgggggaatataggagagtaaggtggtaggggttaaaaattaagattggagggagttaagaggggtgatagatataaggagtggtttgaaatatttattgggtggggttaggggtagatatgggggtttgggtaagagatttgaaaggttattatggagagggtttggtttttttggaattttttatgagtgggtttgaagagaattaggttttaattttttttttttttttgggtagggttattattgttcggaatggtgaaattattttaatgtttcgggagtttatttcggagattgagcgttagcgtttttagttgtttgtaagtaggaattaaattttttatttttattttttgtcgggttttgtgtttttttgtattttatggttttgagaatttttatatttttattataggtatagaaagtattttattgggaaggtcgttgtgtggattatggagtgcggggttgagtcggtgggaggttgtagtagggaggttgtagtattgggttggtttagtgtttttattgtggttttagttgaggtaggaagtagagattgaggtgggggaaggaaatagtaaaggtttttgaaaggtagttcggtttagtgtttaaacgtatgtggttgtggagttggaagttcgggatgtattttggtttgagtgttttgttaattgtgtgatcggagtagtttttttttttaatttttttgtgtattaatagtttttgttttaagggttgttgtgaggagtaaatgagttaatatttgttaatattagaataacgtgtggtatatggtaaattttgtttaagggtttgttgtagttaacgttatttgtgtgttatcgtgtgttgtgagtataatgttttttggttttttgttttgattatttttaattttagggttttttgaaattagagttgttaggtagtgaatttatttattttgagttttttcgtagagttttgtttaaggagttggggtagaggatgttgtatcgggattagaatatgatcggttggtaatattttttttagagttggggttcgtttttatggtaatataattagtttttcgttcgtagtaaggtggaagttggaggttgggagttgggaggatgtggtttttttaaggggtttgtgtgagggtatgtagtttttaggggagaggggttttgatgtttgggtgatgttttttttatttttttttttttagggtttataaaaagatcgagttggaggattttaggttttttttggtttgtggggagggtaaaaaggtaaattttatggtagaggtgggagaggggaggaggatttattataatttgtttagggaggtggaggttttatttgagggtaggggtggaagggatttttggttttagagaatttagtagaggattatagtggtattttttttttattttttttaggttcgggtgatggttattattggggtgattcgaggtttgggagattatagttttaaggtttgtagttttattttgtttattaagtttttttttttttgtttttttgaggtgagttttttaaattatattttgttttttttgggagttttaggttagtttttatttgtagtttttttatttttaagttttttgtttagtaaattttatattttaattttttttgttttttttttttattaggtacgagtgtatgatttgatataatatgagtattgtttagatgatgtgttagttttgggaatagatggtttgtgggatgttattattgattgtgaggtagttgttattgtggatagggtgttgtcggtttatgagtttaatgattatagtaggtaggggttgtatggtatggtggtaaggggatggtattggtgaaagaagggttaaagggaagtaatgtttgggattttatatgtgggtttgtgtatttgtttttttatatatatgttggtatatgaatgtgtatgtgtgtttttggtaggtatatagttttggtttaagttttggttttgggggttcggggtatttttcgagatcgtggttggcgtttttttaataataagttgggtttcggggatgatatttttgttttcgttatttttttgggagggttaggtagttatttttgaggggttgaatattattttttttattagtttttttatatttattttttttatagtttaaattttgaagttgtttttttgatttttttttagtggtaatttaattgaagaagggatgttcgttatatttaaaattatagttattggtaaataaacgagatggataaaggtgtgtgtttgtatttgttttgattagaaattgaaagataagaagaaagttttgtggggtggtggaaagagtattagaatagttttagaaatgtggtgttttttaggttttttattttatttttattttttttattttacgtatttgttgtgagtgttattatttatttttgtggttttatttatttgtttagattttttttgagttttagatttatatatattagttatttttcgaatgttttttggatagtttgttggtattttaatttaaatattttaaattaaatttacgattgttttttatagtatgtttttttttttggtatatttttttaatgggtattagttttgttgttttagttagaaattttggagttggttatttttggtttttattttttttttattaaggtaattgattattaagtattgttgattatagatttttaaaagtatttttttatttatttttattttttttcgtttttagttattattattttttattatattggttttttaaatttagtggttttttattgcgtttagaataaaattaatatttaatttttgtgtatggtatataaggatttttatgatttagttattgtttttttttttagttttattttttattattattattaattttttggggtttgtataattgtgggtttttagtagttttaatttatttaaaatttattgttggatacggtggtttacgtttgtaattttaatattttgggaggtagaggtgagaggattgttaagtttaggagtttaagattattttgggtaatagtgagattttatttttataaaaaaataaaaaattagttgaatgtagtggtgagtgtttgtgggaagtagttaagtatttaaggaaattaagagtattgtttatagtagaaaagaataaagattttaaattagtgatttgtttttattttaagaggttagaaaaagaatagtaaattaaatttaaagtaagttaagggaagtaaaaataaagatgagtaaaataattagaaaaggttttttattagtttgggtaatatagtaagattttatttgtataaaaaatataaaaattaggtgtgatggtatacgtttgtagttttagttgttggggaagttgaagtgggaaaattattggagtttggaaagttgaggttgtagtgagttgagattttgttattgtatatttaggtaatagagattttgttttaaaaaaaaattaaaattaaaaaaatttatatattattttattttgagaattttatttgttgtttaggattgggtatcgtatagtttatatatgtttatattatagtaatgattttcggtattgtaattgtttatattaggagttagtagggagtaggaattaagaataggggttttagagtttagttgtttgggttttagtgttagatttagtattagttttgtaatttttttgaattttaatttgttttttagtaaaatggagatagttattttatgggatttttgtagttaatgtatgtggatttaggtttatgtaatatggatttaataaatgttagttattttgaaattgtattttttatttagattttaagttgtttgaaggtagaaatggatttttcgaatatagtttttagtttattttcgagaaatgtttattgagttagttaagaggtttggggttaaattgttgcggatttgtttttatatttgttaaatgtttggattgtattttagatatttaaagtttgtatgatttttaatatttatttatttattaaatatttgttgataatttattatgtgttatttattttgttagataacgggggaagggataggttggaggagttcgtgaggtagtagggttagattattagtttggagttagataggttcggttgtgtgaatttttgttgttataagttaaaaatagttgtgtaagttatttgatttttttgaattttagtttttttatgggtaaaaggggatgggtatattttttttagagatttgtgatgaatattgaaagggttaagttgtgtagtgttttaagtataagttaatgaaatgttggtggacgtttttattttatttttatttttttagtttttttatagggaaaggagatacgcgtgtaggtaaatattttatgcgttaagttagatttaggagtgggaatagaatttatagttgggatttagaagtatttttaggcgtattttttgaggagtaggtaggaattggatttttggaaattttaggtttagggaagaaagcgaattgtgaggaggaacggtggtttgggtttgaacggttttgagaggtttttaagtttgggggatgacgttgggttgtacgattttaggaataagagggtggatatttttttttaattaatatattcgcgtcgggttttgggatttttcggcggatatttttttttagtttcgtttttcgcgaggttttaggtgtagtaggagcgggtggtcgtttggttataggagggtagtagcggttttttttgattttatttcgagtattttttaattttttcgacgtcggtttttttttaggggattgaaggttgggtagagtttgagtttattcgggtcgtgtttttttcgttcgttcggttttttcgtagtttaggaattttttcgtggtttttttcgatttggaggggtggacgtttttggtttttagttttttttttgcggagggggtcgtcgcgttgcggttttgcgcggggtcggggcgggtcgagttaagggtcgttttcggtcgattttttttttgtcgggttcgtttttttcgtcgcggcgttggaggagggcggggcggggttttggggttagtttgagttttcggtatcggtcgcgtagttggaggcggcggagcggaaggtattttgggtcggggttgcgggcggtggggcgttttgggaattcgtttttaggagagtattttttttttttcgttggttcggagatcggggttcgtgcgaggaggggtttcggtttgggcgtggatttcgttttttttaagcggagtcggtattcgggttgggcggtggtcggatcgcgtcggttttttttcgggttgtagcgagggggttcggatttgtcggtaggggttttggttttttgaggttcgagtcggagtttttttttttttttttttagtttttcggaatttgtttcgtcgggcgaggggcgagggaattttaatttagacgttttagtttttagggtgggcggtcgtaggggatttagagtgggatggggtgggaatttttttaggttaggagggaggtatggcgggaataggggcgggatgtgattattggggtttgttattgttcggtagggtttggacgtcgttttggacggtttttggagttcgtttgtgttgaggataagggagatggggaaggatttaattttgtgtgtgtgtgtgtgtgtgtgtgtgtgtgtgtgtgtgtgtgtgtgtgtgtgtgtgtgtgtgtgtgtgtgtgtggtgtgtgtgtgtgtgtgtgtgtgtgtgtgtgtgtagagagagagagagagagagaaaatgagattgagaattttttttttttatattcgaattaagaaagagtattttggggtttgggattgggatttcgaggtcgagtttcgtttttattttggttttaaagttgagaatgtagtattttttggtatttttagaacggattttttttttaggtgtagggtgggtcggtaaagttaatcggtcgttttggattatttgggaatttaagagagcgattggagagaggtttgatgtagtt

SEQ ID NO: 163 - DNA, 13537 bp, Artificial Sequence
  chemically treated genomic DNA (Homo sapiens)
tgtataattatcgttaattcggtttttagtagaggtttgtgggttagggagtgtatcgatttgtattgttaaaggaattttttgttttttttagtgttagttgaagagttttttgtagttatttttttattttgagagaagagaaataagaggagacgaatttttggtttttttttacggggtgtatagattagtgataatgttagttttataatttggatttatttgtttgttttttaattatcgttatttttttaagtataaagtttgtgtttataattagatattttttatatgttatatcggtaagtttattttattattttatagagggatggtgattttttttagcgttttatattgatcgcggttttttatttgttgattgattgatttataaatttgttttttatttatttgtttgtttattgaaggtaaattcgttatcgggaatatagtagttttttaataattatttaatgtatggttattttttttaggatttagaatattaaagggacgtgttttttttttttaaattatttgtttgcgttttttttagtcgggtgttttagtttttatttcggttcggttattattttatttcgttttttcgcggtttttaggtttcgggttgggattttagtttttgtttgtaggtgcggtttagagggtgcgatacgcgtcggagcggggtagcggaggaggggatagggacgcggtagttatattcgtattttttttttttttcgggtattttcgagggtttttttgtttttagttttttgagttttcgaagttttttatgcggtaagagcgagtcgtaggaataagtggggaattttggtcgcggttttttttttcgttttataaaaaagaaattgatttttgtttggagtttgtgaaaagtggggttcggggtttagttaatggggcgtttcgcggcgcgggttgagtggagttagcgcgaatcgtttagtcgcggttttaattaattcgttttttgtgcggttcgttcggtcgttttcgtcgtagtcgtattagcggtttattgttcggtttcgtcgggtcgcgggatttattttttttaaatagtcggttttgtttagggtagttcgagcggaagttttttattgataatttgttttaaatagatagatttgttagaagcgattttcgggaaggaagtaaaaagttatcggttcgaaggttgggtttaaaatagggattttgcgttttattcgcggtcgcgtcgttttttcgcgttttcggttttgtagtttcgaagtttcgcgggggtttagattattgtatttgttgagttagatatttcgcggatttgattttcgttttatttatttgtaaaatggagtagttgggcgttggtaagtcgtaagtttaagagttttggttttattagcgtgtacgacgtttattttttttttttttttttatattttttttaaaaattgtaagttagaaaatttggttaggttttcgcgacggcgagaaacggttttgaaggtcggtcggtcgtcgtaatgcggttcggatcgtgtacgtgttgtttcgttattgtttttcggtttttttttaataaagatgttaatcgtgttaaattataggtggtgtttttgtaagattagttattgtttttttataagttaagatataaaacgttttgtattgaatggtttatgatttggagcgtttaatttgggagttgagttgttagatttttttttttttatttattagagttattttttttttaaatgattttatttaataagtaaaatttaaatggggtggggggggatttaatatgttgtggatgaaaagaatagttattgatttttttatatttaatggtatgtaggagttttttaaaatatagttttatattaaatagatttgtgaattttaagtagaattgaattgtattaattagttgatgggtttgtttattttttattattagatgagaaatataaaggttgggaatttatagcgtttaattttattgtatttaagtaatttttttttttagtttagaaaattttttattagttgtatatgagagaaaaattgaagtaaaaaaaaaaaaatttgttttttgtttatttattaggtgaatatatattttagtattatatagaggaaattttaggtggtttttagtaagattttagtggttaagagttataatttagaaaagatgataatatatatatagtgttaatagtatttaaataaatattttagataatagaataatggttattaattatgatgttttgggtttttgattaattttttatgtttgtttgtagttaaatagttgtaggatttttttttttttaaaaattgtttgtgtattattttaaaaattgtatttaatagttatattttttagagtagtttttttgtgtggaattgaagtgaatggtttagtaatagcgatgaagttagtaagtagtaagaatgttttttatgttaaaagaattttaattattttgttagaaatgggttatatttttattttttgaaatgtagaagttgtttgttattgtatgatttttagtatggtttatatgtttaaataaatggaattatttaattttgtttatatttgtattagtgtttttaaaattgattaagttgtgtaattgtattaaagtgtattttttttggggtttgaaaatattaaagaaattaagagagggtaagattattttgtaaaattgtttttttatttttttagataaatattatattttaaaaattatttggtgatttaaagattaaaatgaatgtatttttgtatattttaaatatgtaattttaatgattatttagttattgtagttggaaatatatatatttagggatatagatatgtataattatgaatatttgggtaattatatattgtaattaattattaatgtatggattaaaattaaattatttttattgtttttattgttatttagtatttaataagtatttatttggtattaaaagatggttaaaatatattaaataatgttagttttttaaaaaggtattaaaatatttatattttagatagatatatatatgttgtatgtagtgtatgttggtgttttaaatattttattatttaatgttttgatttgatagaaatgttagattttaaattattgttttatttattttaatagttatatttgaaattttagaggttaaggagaaatgtttgtaatttatttttttagttgtgaatttttgtatttgaaaggttaaatttttttttttttagtaggtaattattttatgttttgaagtatgagatttgattatttttattattattttagtttgtatagatatagatgttattaacggttgtagtttatttaatttttttttaaaacgtagttgtagtatttgatttggggattttttgtgaattttattggttgatttcgttttgtataaagtacgtggggtttgggggagggagaagagagagggaggtttgttttgttttggagggttttttttttttttttttgaattagagttttttaaatagttattcggtatttttgtaagtgatgtgaattttgaaattatttattagaataggataatagagtattgtgtgaattagatttgttggaaataaagtatagtagaatgtatgatgttttttattttattggtagagattaaatatgtggttttgatatatttatttatataataaagaattgtagtttattttgaaatatattggttatatttaaattggagtatttggttttatataataattgtttttataagtgttgaaatagtaatttggataaagtaggttttaaagttgttgtgaagggaagatagggacgtttttaaaatttgaaaggtttagattggtaatttaggtagattaaatttagcgattaattggttaatttaattattgttttttttttagtatttatgatttgtgtttttaagtattgtttttgtaggttatattattttttttataaaatagagaggatattttataggttttttatattttggaatatagtaaattttaagtattggtagaaagggaatttagaaaaaaattttgtgaagtaaaggaggttgacgttgtataaatattgaattatagttttaagatgtataaaatattgtttttaattttaattattttattagtaagtaagtgaaattgttttaattggagtttttagaagtttttttgggaaatgagaggtagttggatgtagtagaatgtagtggaatgagtattttaaagagtattggatttagtattaggagatatgggttttggggatgatttttgttttttagtgagtaagtaaggataagttgtttttaaggtttttattttttttatttataaaatgattatattagaggagtgttttgtaatttatgtgttttgtgattttacgttaaatggaagttaagttagattgtgtaatttataggaaattaggaggttgaagaaagtttggtagttagtatttttttggatgtagtttgtgttttgtttttttgtttttttagttatttttttgtttttagaaagttaaaaatgatttgtattgttttttaaggtttggagatttagaggatttgtttttgttttttttttattttattgttggggttgagtaaaaatgagttttttattttaagttttagtagtttttattgagtattattaggtaggtttatttatatattttatatttataaagtattattatgtgttagggtgtaagggattagaaagatgtttttatttgattatttttggagttagagaatgttaagatgtagcgggattttagaagtttcggagttttagtttgattttagaattgaatttttgtttaattaagggtgtgaataaatgtaaagatatgatttgttatttgttaaggttgtggggtgaggggggtggttatatagagtattgtttttttgttgttagtagcgtttatttttttatttgtggggagtaatagattatttttggtaatatagtgtttaaaagtgttaagaaaaattttgtaatttaggatttattggattttagagaataagcgttttttttttggattgtttttgtttatttggggggtaaatttggataagaattaaataatttgtagagagatttatagtagaattaagagtaagtttgtaaatattgttttttttatttggtatttagtaagtatttattatgtgttagatattgttttatgatttatttttttttttattatttattgggtaaataatagttataggttgaattatgatgtggaagtaaatgtaaattaatttttttttttatataaataaataaataaataaataaataaaaatttgtgttagaatgtttttggatattaaatattaaaatttagttaagtttagttggtaggtttttttagcgatttttttggtttgagtattttttaattttgtatatcggtaaggggaatggtattttaaaggagtgattttttagaggttgaatggtttttgtgaggggtcgattataggggattggggaaggggtttttttaatattaattttattagttttgttagttgatgggaaagtttgtttttttattttcggtattttaatttagaagaatgtgtgtgtgtggagggggtgttaatggaaaaaatgttatcgtttttagagaagttagtgaatggtagggttagtagttaattttagatagtttgaaattttgaggggtgttttgtatttttgttttttttatataatttagttaataggattttttttaatagggtattagtagaggaatgagttataatataatatagtttttagaggattgtagaattagtagatttttttaatataaggttagttttttagggtaattttggatagtttatgttatcgtatattggtttagggttttttgtatatatttttagtgttttgtgttttattttaatttaaaatatttattattttttatgtgtttgttttttgttatatggagaaaggagttatgttattaatttgttatatttttagggtttggtatatagtgggtgtttagtatttgatgagtgggtagattgatggatgggtagaaatattttttgatttatggtttttttatgattttattttttattttttggattaaaatgtaaatatttttcgataaaagaattttttttgcgttttaggttttggttttggttgagagttttatatttataagcgtttatagaggaaattaggggttatgtttgaatttgtttagaagggttttagaatttttgagggtgtggttatttttattattttttaaagtaataaatttatttttgtaatttaaggttttgtttttgttaaaagataattttgagttagatggtatttgttttttattaattattttttttaatggatttataggaaaaaatttttgaaagttaagatcgaatagggtgagaatttttttataaataataatttggaatttagagaggtttagttattcgtttaaggttatatagtttgttggtatagttttgaatttttatttcgtggtttttagcgtttagtttggttgtgtttttagtggttttttagggtatttgtaggtgatttttttttatttgtttaatatttatgtagtatttattatgaattaggtagtatgttggggtttgtggatagaaagatgaagagttatagtttttgttttgtaaaggtttttttttttgagttgtatttatggtagttttaagtttttacgttttaaattcgaggtttttcgtggtttgtagtagttttgtttgagtagaaggtagttcgtattaaggttttaggtttatttgggatttggtgggcgacggggttttagtttttttcgtttattttggagtttgttgtcgtcgttattattgaattagttatgttagaaagttattacgatgattttagaattgtattgtgatttatgtaaagcgcgtcgataattatagtcgggcgtatagaatataggatgtatatgttgcgggtgtgtgcgcgtagtgttgtgtttttcgttagggttgaatggggtgtgtgtgtatttcgtaggtatttttttgatattatgtttgatcggggattggtgataggaaaaagagggaagatatttattttgattttgagataatttgatgagttttgggagtattttttagaagttttggtgtttataaatgagttagtttggtaggagcgttcgagagtaggggaagaggtggtttggagtttaggaaagttatcgtttagttttcgtataggtaaagtaattagtagttttttttttcgaaatagatttttaaatgttttttttgtagataggtttgggtttagttattattttttatattgtttttattttcgttttagataaattagttttatttttgaagttttttgttttgaattaaagaattttataatcgcgttcgcgttatgggggtggtggtggtaggtggttgaagtaagtggatttttggcgtgaattagaatttgaggattttaaacggagtttggtattttattgtgttttttaaattttgttcgaaattttttttttttttgggcgtcgagttcgagaaagcgttacgtcgtcggtcgggttagttttataagcggttgtataagttggttgttaaaaaacgttgatttttttttttgttatttaataaatttttacgcgtttatggtttcgttttataattttttaatttcgttttaattcgaaaaatcgaggaggagggaataaattgagagataaagatttttttattttgtttttttttcgggattttagttttggtcgcggcgttttattaaggaggatataggttttggtgtgtgtggtgtgcgagatttcgagttcgaggtcgagttaaggttgggtagaaagttgtaattacgtgttgtcggagtttattggagcgtatagttcgttttttttgggacgtttaggcggaggatttgttgcgtttttttagggttcgggggattttagtatttatttgtacgtataggcgaattttgattgaaagttcgggatgatatcgagtttggagaaagagggatcggggggtgggttggcggaattgtagagcgtcggttatagttttttttttcgcgaacgtcgagcggagggcgggaggtgtaatttttgatttttggtcgggtttacgttttgaggagggattggtaagtttttgttcgataagtttaagttgtcgagagagtttaaatagaattaattttttagagatcggggattatcgttttttcggtatgcgtttttttagcgtcgcgtatagagtaaggcgcgagagagtttaggaatcgcgggaaggtaagcggaatggggagggggtaggggatgagggtttttttttattattttttcgttcggagagcgggagttcgtaacgttcgtcgaggacgagcggcgggagggaacgttttgttttttagtcgtttcggtgtagataatggaggcgataagagattcgtttagcgtcggatgggttagttttgtttggggaagttggcggtatttttttttcggttggtgtttaaatttattgcgcgaaggtcgaaggaacgcggaatttttagaagattttatttttagttttgatttttcgtagatatgtgtaaaatgagtaaattatttatttcgggttagatttaagttttatttaatagaaggggtatcggattaagaatgaattaatttatatggttatgttcggcgcgtataattatacgttagtatatagttatttaatttttttcgcgaatttatttggtattttggagagagggggaaaagcgttttgagaaagtttcgttattttttttttttttttttgtcgtgaaatatacgaatttatttttattacgagtcgtatcgtttttattattacgtacgtatagagttatatttttatatttatattttttaattcgtaagtttcgatagcgtttgtattttttttgggagtcgtttggaggtttattaatattattagtatttaattttttttttttttttatttttttttcgtatatggttgacgttagatttcgttaggagttgggggaaaagttaagtgggttagggacgttttattttttttttcgcggttgtttgttagagcgtttttggagatattataggggatttagttcgtagcgataggtataaagttacggggtaatgaatttcggggatttttcgtcgttgcgtgcgcggtttttttcggaaattcggatttggtcgttttttttttcggaagattttttagtaatttagtttttttattttgcgtttgggtttcggtagcgcggagttcgtttgtttttgagattgcggtagtgttttttttttttttttgggagattagcggtcggtagagattgtttatattttgtatgtttatgtagagggagagatcgaagattgagtgataggaatggggaaaaagagggatttcgtttcgtaggaaggttattttcgtgtttttatttttgttttttaatattttttttttgttgttttttttttttttttagtttttttgtttatttttttatttgtttgtttatgtgtgtgtttatattaagtagtatttttagtagttgcggttttgtaagagtcgggaagaaatttaaggatgtttaaatttttattgttggacgaattttgagcgtttagggagtagcgtagcgcgcgattgatatttatttgtttcgtttaggagttttgtaggttggagggtagttggagagcggcggcgttcggcggcgaggcgggcgttgtcggtcgggattcgggtagcgtttattaatcgtttcgtttcgggatagttagtatgagtaagttagtcggattaataagtgggtatttttcgggtcgtcgtggggtttaggcgcgtagtttggggcgagcgagcggggaggttgggggaggttttgtttggagcgttgcgaatttgagtttttgagagggattttagcgggcgtgtgcgttcggtttagatttgtagatcgtgagttggagtatttcgtggagaggggagagtcgtttcgttgtttttggattgtttgattttttttgtttggtgcggtgagaaggttacgattcgcgtagtttattagtcggatgagttgtttttatttagtcgttaggtgttggatgggggggttatgggggcgggaattgggtcgtagttttaggcggtagtataataatatattcgtttaaaatttcgagttttagcgcgtaaaagtaattttgtgtaaagcggattttgaatggaatgttttgtatttcgtttttagttattttaaataattttgtaaattgggaagtagaaataatttaaaagttatattttttttaattttaaattcgcgtaggttataattggggaatttaaagtatggcgaattattttagtaaagagaggattaaatttttaattttaaggatttttcgagtcggagtttagtagaggtaggagtgcgcggtttgtttttttcgtgcgttttttttttttttcgaatttttttagttgtcggtttttcgaacgttaggtcgtagttgattttttattatttcgagatttacgagcgtagggttaagtgtgtgtgcgagggtatttgtttgtattttgtttgcggaatttaagaatgtgtaggttcgagttagcgttgagtaggcgcggttacggtgtttagatttttcgggggtattttagttttcgttatttagtggtttacggttgcgggttttagggtttgaggttggggattatcgttgtcgtcgtagtttttatatttcgaagttgttttgttgtttgtgttgttttcgtagatagtatttttggcgttttgtgcgtttttttttttttttttttttttttattcgtttttattgttttgagtttttgaaagttgggagaatcggagatatttttgaggattggtaatgaagttttatttaagtgggatgtaattttcgtttttttatttttttttaagaaggaggttgtgtttttattttgttttgttttgggtgttgatttttaaaaaattagagtaaaatgaacgtgaataaaaagaaaaggagaaatgtttcgagttggggtagagggagtagagaaggagtttttatcgcggtcggaatgtagagcggattttggtttaggattgggtttttttttaggttcgggtttattttggttttcgttgttggaatttttaggaggtaaagcgatttcgatttttgttgttcgtattttcgggcgtgagtgttttttttaggaggtttaggaggtcgtttttgttgtattttgagttttcgttgtaaaaattgaagttcgtgggtttcggtaggttttttagttcgttcgtttcgggataggttttcgtttatatttttggaagtaaggagtttcgggttttttcgtttttttcggggtgtggagtttttggggtttttgaaaggtgaggttttagaggcgagggaggggtgagcggggagttttgttcgtttgcggttgcgttttcgttgtggattaggaggtaggttaatttttcggattttgggggaaaaattatagcgggttttttgcggaaattttggtcgttttaatttgttaagagtttgagtgaggttttggaagtttttagtttcggtttaggtcgggacgcggttgttgagtttttttaggttcgtaggatagcggttttcgtcggtggcgtcgttgtatttaggttttttttagatcggtggcggtagttaattcgagatttgcgtttttcgggttcggggtagttaggaggtcggcgcgtagcgggtcgggttaggattgggtcgagtagatagagttgtagttttcgttttgttcggtttttcgcggttggagagtagagcgatgttattcggagtttcgtttgggtggtaacgagattttggttagttatttttgtagtttagattaattttttttaatagtttttgatggtaattatagtaatcgaagttgttatatatttttaggtaattatgatatataaaaagtttcgaggggattttttggcgagggaagttaagaacggttttttagttttaggaaatttcggttcgttttacgtcggagttcgttcggtttgttaaatgagaggagttttgtaacggggttaattagtttgtttcgtgattttaagttattttaacgtggttgggtggcggagtttgaggtataggttcgttatgtttcggaattttcgcgttttttttttttgggtttcgttttagttcggttgtttgtttttaatttgtttcgggagtcgcggtttagaggtttgtttagaggtaggattcgtattggtggtggtttagagggtaatagttcggaagttcgggcgggggaattcgaggaggggtttttattttgtattggttttttttttatttttatcgggttttttagagatgttgttatgggttttttgttcggatgggaagtggggaaaaagagattttattattgttttttttatttatttattttggtatttttaatagtgttatagggaagaggatagttggggtgatagtattgttgggttttaaacgtggattttggagcggttagagggcgcgtgttaagtagaggatggttgtaagatatggaaattaagtttatcgtttttagagtgagtgtagtgtagcggagttttagattcggtttttgagcgattaggaatttttttgggcgtagtgataggttcgaaggagtggaggataagattcgttgtgtttttgtttggttttttttagttttttttttttatagtataattttttttttcgttttgtgggaggggggcgtcgagtcggtggtcgtcgcgtcgcgcgttttttttgttcgtttttgtcgtcgttcgaatttttatgttattttttttgacgggttattggtggttttataggtaggtgttgtcgcggggttgtaattattcggtcgagtttggtcgttatcgaatatttttttatttttaagtacggtttttcgcgtttttttttttttattttttttatttgagacgagtttgggatttacggtgtaagttcgttcggacgtttcgggttttaggagtaagtttatatttgcggtgtttcgaggtttttttcgcgttacgtttttattttttttatttttttcgtttagacgttttattgtcgtttttttttattttaattttatcgtagtttttaatttaagcgttttcggtagtagttgtcgaattttagggaggtttgaggtcgttggggtttaaattggaggttttcggataggtagaagaagagaaaagtaagtgttaataagttaattgttattaatt

SEQ ID NO: 164 - DNA, 13537 bp, Artificial Sequence
  chemically treated genomic DNA (Homo sapiens)
agttgataataattgatttattaatatttgtttttttttttttttatttattcgaaggtttttagtttgggttttagcggttttaggtttttttgaaattcgatagttgttgtcgaaagcgtttgggttggggattacgatgggattgaggtgggaaggggcggtagtggaacgtttgggcgaggggagtaggggaggtgagggcgtggcgcggggagggtttcgaggtatcgtaggtgtaaatttgtttttggaattcgaggcgttcgggcgagtttgtatcgtgggttttagattcgttttaggtggagggggtgggggaaggagagcgcgggggatcgtgtttgggggtgagggggtgttcggtaacgattaggttcggtcgggtaattataatttcgcggtagtatttgtttatagagttattagtgattcgttaaaaagagtagtatgggaattcggacggcgataaaggcgggtaggggaggcgcgcggcgcggcggttatcggttcggcgttttttttttatagggcgggaggggagattgtgttgtgggagggaggggttggagagggttaggtaagggtatagcgggttttgttttttattttttcgggtttgttattgcgtttaagggagtttttggtcgtttaggaatcgggtttggagtttcgttgtattgtatttattttggaagcggtaaatttggtttttatattttataattattttttgtttaatacgcgttttttgatcgttttagggtttacgtttggggtttagtagtattgttattttagttgtttttttttttgtggtattgttgaagatgttaagatgagtgagtgggaggagtagtggtggggtttttttttttttattttttattcggataggaggtttatgataatatttttggagaattcgatgagggtggagggaagattagtgtagggtgggggttttttttcggattttttcgttcgagttttcggattgttgttttttaggttattattagtgcgagttttgtttttgagtagatttttgagtcgcggttttcggggtagattagaaataggtaatcgggttggggcggggtttaggagggagggacgcgaaaatttcggggtatagcgggtttgtgttttagatttcgttatttagttacgttaaggtgatttggggttacgagataagttggttgatttcgttgtaaagttttttttatttagtaagtcgagcgagtttcgacgtgaggcgagtcggagttttttgaagttggaaaatcgtttttaatttttttcgttagggggttttttcggggttttttgtgtgttataattgtttaaagatatatggtagtttcgattattgtaattattattagaggttgttgaaagaagttagtttgggttgtaggggtgattggttagggtttcgttattatttaggcggggtttcgggtgatatcgttttgttttttagtcgcgagaagtcgggtaaggcgggggttgtagttttgtttgttcgatttagttttgattcggttcgttgcgcgtcgattttttagttgtttcgggttcgagggacgtaagtttcgggttggttgtcgttatcggtttggaaagggtttaaatgtagcggcgttatcggcgggggtcgttgttttgcgggtttgagaaagtttagtagtcgcgtttcgatttgagtcggggttggaggtttttaaggttttatttaggtttttggtaagttagaacggttaaagttttcgtaaggagttcgttgtggttttttttttaaagttcggagggttggtttgttttttagtttatagcgggggcgtagtcgtaggcgggtagagtttttcgtttatttttttttcgtttttgaggttttattttttaagggttttaggggttttatatttcgaaaaggacgaaagagttcggggttttttatttttaggggtgtaggcgagggtttgtttcggggcgagcgagttaggaggtttgtcgagatttacgggttttagtttttgtaacggaggtttagaatgtaatagaaacggttttttgagttttttgggaaggatatttacgttcgggaatgcgggtaataaaaatcgaggtcgttttattttttggagattttaatagcgagggttagggtaggttcgagtttaaagggaaatttagttttgggttagggttcgttttgtatttcggtcgcggtgagggttttttttttgttttttttgttttagttcgaaatatttttttttttttttttgtttacgtttattttgttttaattttttaaaggttagtatttaaagtaaaataaaatgaaaatataattttttttttggaggggggtaggagggcgggaattgtattttatttaagtgagattttattattagtttttagaagtattttcgatttttttaatttttaaagatttaggataatgagggcgagtgaaagggggagggggagggaaggaacgtatagagcgttaaaaatgttatttgcgaaaataatataagtagtaaggtaatttcgggatatggggattgcggcggtaacggtagtttttagttttagattttggagttcgtagtcgtgggttattggatggcgggaattgaaatgttttcgggagatttgagtatcgtgatcgcgtttgtttaacgttggttcgggtttgtatatttttgggtttcgtaggtagggtgtaagtaaatgttttcgtatatatatttagttttgcgttcgtgagtttcggggtggtgagaggttagttgcggtttggcgttcggagagtcggtagttaaggaagttcgaggaaggagagaagcgtacggagggagtaggtcgcgtatttttgtttttgttgggtttcggttcgaaaagtttttgggattagggatttggttttttttttgttagagtggttcgttatattttaaattttttagttatgatttacgcggatttaggattaaggaaaatgtgatttttaaattgtttttgttttttagtttgtaggattatttgaaatagttagaaacggggtgtaaagtattttatttaaaattcgttttgtatagagttgtttttgcgcgttggagttcggagttttgagcgagtgtgttattgtgttatcgtttggagttgcggtttagttttcgtttttatggtttttttatttagtatttggcggttaaatggagataatttattcgattggtgggttgcgcgggtcgtaatttttttatcgtattagataggggggattaagtaatttagaggtaacgaaacggtttttttttttttacgaaatgttttaatttacggtttataggtttgggtcgaacgtatacgttcgttggaattttttttaggggtttagattcgtagcgttttaggtaggattttttttagttttttcgttcgttcgttttaggttgcgcgtttaggttttacggcggttcgagaggtatttatttgttgattcggttggtttgtttatgttggttgtttcggggcggagcggttggtgggcgttgttcgagtttcggtcggtagcgttcgtttcgtcgtcgggcgtcgtcgttttttagttgttttttagtttgtaaggtttttgggcgggataggtgggtgttagtcgcgcgttgcgttgttttttgggcgtttagaattcgtttaatagtggaaatttaagtatttttaagttttttttcggtttttgtaaaatcgtagttgttgggaatgttgtttgatatggatatatatatggatagatagatggagagatggataggaagattgaggaagaaggaagaatagtaagagagggatgttgaaagatagagatggagatacgaaaatggtttttttacggagcgaaatttttttttttttttatttttgttatttagttttcgatttttttttttatataggtatgtagagtgtgggtaatttttgtcgatcgttggttttttaaggaaagaaggaaaatattatcgtagttttagaggtagacgggtttcgcgttgtcggaatttaagcgtagagtgggaaaattagattgttgggaaatttttcgagggaagaggcggttaggttcgggttttcggggagagtcgcgtacgtagcggcgaagggttttcgaagtttattatttcgtgattttgtgtttgtcgttgcgggttgggttttttgtaatatttttagaagcgttttgataggtagtcgcggggaggggaatagggcgtttttggtttatttagttttttttttaatttttggcggggtttgacgttagttatgtgcggggaggggatgggaagagggagggggttaaatgttaatgatattaatgaatttttaagcggtttttaaagaaaatgtaggcgttgtcggagtttacgagttagaaagtgtgaatatgggagtgtggttttgtgcgtgcgtgatggtgaggacggtgcggttcgtaataaaaatgaattcgtatattttacggtaagaaggaaggggaggggtgacggggtttttttaaaacgtttttttttttttttttagagtgttagatagattcgcggaagaaattgggtggttgtgtgttggcgtgtgattgtgcgcgtcggatatggttatgtgagttggtttatttttggttcggtgttttttttgttgggtaaaatttggatttggttcgaggtgagtaatttatttattttgtatatatttacggaaagttagggttgaggatggggttttttggaggtttcgcgttttttcggttttcgcgtagtgggtttgggtattagtcgaggggaggatgtcgttagtttttttaagtagagttggtttattcgacgttgagcgaattttttgtcgtttttattatttgtatcggggcggttggagggtagagcgttttttttcgtcgttcgttttcggcgggcgttgcgggttttcgtttttcgggcggaggaatagtgaagagaggtttttattttttattttttttttatttcgtttgttttttcgcgatttttgagttttttcgcgttttgttttgtgcgcggcgttgggagagcgtatgtcgagggagcgatgattttcgatttttaagagattaattttatttaagttttttcggtagtttgaatttgtcgaataagagtttgttagtttttttttagggcgtggattcggttagaggttagaggttatatttttcgtttttcgttcgacgttcgcggggaggggagttgtggtcggcgttttgtaatttcgttagtttatttttcggtttttttttttttagattcggtgttatttcgggtttttaattagagttcgtttgtgcgtgtaagtgaatgttggagtttttcgagttttgggagggcgtagtaggtttttcgtttgggcgttttagggggagcgggttgtgcgttttagtgggtttcgatagtacgtgattgtaattttttgtttagttttggttcggtttcgagttcggggtttcgtatattatatatattagagtttgtgttttttttagtggggcgtcgcgattaaggttggggtttcggggaaagagtaagatggggggatttttattttttagtttattttttttttttcggtttttcgaattgggacgagattgggggattgtgggacgaggttataagcgcgtaggggtttattaggtgataggaggagaaattagcgttttttgatagttaatttgtatagtcgtttgtggagttagttcgatcggcggcgtagcgttttttcgaattcggcgtttagagaggggaggaatttcgggtaggatttgagaaatataataagatgttaggtttcgtttggaatttttaggttttggtttacgttagaaatttatttgttttagttatttattattattatttttataacgcggacgcgattatggggttttttggtttaggataaagaattttaagggtggaattaatttatttggggcgaagatgagggtagtgtggggggtgatgattagatttaggtttgtttgtaggggaagtatttaggggtttgtttcgagaaggagaattattaattgttttgtttgtgcgggggttggacgatggtttttttgggttttaaattatttttttttttattttcgaacgtttttgttaggttggtttatttgtaggtattaaaatttttggaaaatatttttaaggtttattaaattgttttaaaattaaaatgggtatttttttttttttttttgttattagttttcgattaagtatggtgttaagaagatgtttacggaatatatatatattttatttagttttggcgaaaggtataatattgcgcgtatatattcgtagtatatgtattttgtgttttgtgcgttcggttgtaattatcggcgcgttttgtataaattataatatagttttgaaattatcgtgatgattttttggtatgattggtttagtggtaacggcggtaataagttttagggtaggcgggaggggttgaggtttcgtcgtttattaggttttaaataagtttggagttttagtgcgggttgttttttatttaggtaaagttgttgtaggttacgggggatttcggatttaaggcgtagaaatttggggttattatgggtatagtttagagaagaaagtttttgtaggataaagattatggttttttatttttttatttataggttttagtatgttgtttgatttatagtaggtgttgtataaatgttgggtaaatgaagggaagttatttgtagatgttttgaggggttattggaggtatagttaggttaaacgttggaaattacgagatagggatttagggttgtgttaataagttgtgtgattttaggcgagtggttagatttttttgggttttagattgttatttgtaaaaggatttttattttgttcggttttaatttttaaagatttttttttgtgagtttattaaaggaaatgattgataaggggtaaatgttatttggtttagaattattttttaatagagataagattttaagttataaggataagtttattgttttggaaggtggtggggatagttatatttttagaggttttgaaatttttttaaataggtttagatatagtttttaattttttttgtaggcgtttgtgagtatggagtttttaattaaaattaaagtttaaaacgtagggaaggtttttttatcgaaggatgtttatattttggtttaagagataggaaataagattatgagaggattatggattaaggggtatttttgtttatttattaatttatttatttattaaatattgagtatttattatatgttagattttggggatatagtagattaatgatatgatttttttttttatgtagtagggagtagatatataaaagatgataaatgttttagattgggatgaaatataggatattggagatatatataaggagttttaaattagtgtgcggtgatataggttgtttagaattgttttggaaagttggttttgtgttaggagaatttattgattttatagttttttgaggattgtattgtattatagtttatttttttgttagtgttttgttaaagagaattttattaattaggttgtatgagagaggtaggggtatagagtattttttaaagttttagattatttgaggttgattgttagttttgttatttattagtttttttaaaaacggtgatattttttttattaatattttttttatatatatatatttttttaaattaaaatatcgaaggtgaaaggataagtttttttattagttagtagagttgatggaattggtgttaaagagattttttttttaattttttgtgatcgattttttatagaggttatttaatttttagagagttatttttttaaaatattattttttttatcgatatgtagagttaagagatgtttagattaaggaaatcgttgggaaaatttattagttgagtttggttgagttttgatgtttagtatttaaaaatattttgatataagtttttgtttgtttgtttgtttgtttgtttatatgaaggaggaagttgatttgtatttgtttttatattataatttaatttatggttgttgtttgtttagtggatggtgagagaggaggtgggttatggagtagtgtttggtatatagtaggtgtttgttaagtgttaaatgaaagaaatagtgtttgtaggtttgtttttgattttgttgtggatttttttataagttgtttgatttttatttaaatttattttttaaataaataagaataatttagaaaagagacgtttgttttttagaatttagtgggttttgagttgtagggttttttttgatatttttgagtattgtattgttaaaagtagtttgttattttttataagtaggaagatgaacgttgttaataataaggagataatgttttgtgtgattattttttttattttataattttaataaataataagttatgtttttgtatttatttatatttttggttggataaaaatttagttttaaagttaggttgagatttcgaggtttttagagtttcgttgtattttgatattttttggttttaagaataattaagtagaaatatttttttagttttttgtattttggtatatagtggtgttttgtaaatgtggaatgtatgagtgaatttgtttgatgatatttaatgaaagttattgaagtttgaggtgaagggtttatttttgtttagttttagtaatggggtaggaagggaatagggataggttttttgaatttttaaattttgggaagtagtgtaggttatttttggttttttgaaaataaaagaatgattagagaaataagaaagtagaatatagattatatttagggagatattggttgttaagttttttttagttttttaattttttgtgaattatatagtttaatttggtttttatttagcgtggaattatagagtatataagttataaggtatttttttaatgtagttattttatagatgaggaaagtgagaattttagagataatttgtttttgtttatttattgagagatagagattatttttagaatttatattttttgatgttgagtttagtgttttttgaaatatttattttattgtattttattgtatttagttattttttattttttagaagggtttttagaagttttaattaaagtaattttatttatttattagtgaagtaattagaattaagaatagtgttttgtgtattttgaaattatagtttagtatttgtgtaacgttagttttttttattttatagggtttttttttaaattttttttttgttagtatttaaaatttgttgtgttttaaggtataggaaatttgtgaggtgttttttttgttttatagaagggatgatatgatttataggagtaatatttagagatataaattatagatgttgagaaaaaggtaatgattagattgattaattaatcgttgaatttgatttgtttggattgttaatttaggttttttagattttaaaaacgtttttgttttttttttatagtagttttaggatttattttatttagattattgttttaatatttgtagaaataattgttatgtaaaattaggtattttagtttgaatgtggttaatatattttagaataagttataattttttattatgtggatgagtatattaggattatatatttgatttttgttaatgaagtgaaaagtattatatattttattatgttttgtttttaatagatttagtttatatagtattttgttgttttattttagtaagtaattttagaatttatattatttataaagatgtcgagtggttatttagggaattttgatttaaaaaaaaaaaaaaaaaattttttaaaataaaataaatttttttttttttttttttttttttaaattttacgtgttttgtgtaagacggagttaattagtgggatttataggaggtttttaagttaaatgttgtagttgcgttttaaaaaagggttggataaattatagtcgttaataatatttgtatttatgtaagttaagatgatgataggggtaattagattttatgttttagggtataagatgattgtttgttgggaggaggaggatttggttttttaggtataggagtttataattgaggaggtaggttgtagatatttttttttagtttttaaaattttaggtgtaattgttgggataggtgaaatagtgatttgaaatttaatatttttattagattaggatattaaataatgagatatttgaaatattaatatgtattatatataatatatgtgtatttatttaggatataagtattttgatatttttttggaaggttgatattgtttgatatattttgattattttttagtgttaagtggatatttgttaagtattaaataataatgaaaatagtggaggtaatttgattttagtttatgtattaatagttagttataatgtgtaattatttaagtatttataattgtatatatttgtatttttaaatatatgtatttttagttgtagtagttaaataattattggaattgtatatttggagtgtatagaaatgtatttattttaatttttggattattaagtaatttttaaaatgtaatatttatttggaagagtgagaaagtaattttgtaaaataattttatttttttttgatttttttaatatttttaaattttaagaaaggtatattttagtatagttgtataatttaattaattttgaaaatattagtgtaagtgtgagtagggttaaataattttatttatttagatatgtaaattatattgaaggttatatagtagtagatagtttttatattttagagagtaaaaatgtagtttatttttagtagagtggttagagtttttttggtatgaaagatatttttattatttattggttttatcgttattgttaaattatttattttagttttatatagagggattgttttggagaatatggttgttaaatgtaatttttaaaatgatgtataaatagtttttaaagggggaaaaattttgtagttgtttggttgtagatagatatgggaaattagttagaagtttaaagtattatagttaataattattattttgttgtttgggatgtttgtttaaatattattgatattgtgtatgtattgttattttttttaaattgtagtttttaattattgaaattttgttaaagattatttagggttttttttgtatgatgttgaagtgtgtatttatttgatggataaataaaaaatagatttttttttttttgttttaattttttttttatgtgtaattagtaggaaattttttggattaaagggagagattgtttaagtatagtagaattagacgttgtggatttttaatttttgtattttttatttagtgatagaagatgaataaatttattaattgattaatataatttagttttgtttaaaatttatagatttgtttggtatgagattgtattttaaaagatttttatatgttattaagtgtgaagaaattagtaattattttttttatttatagtatgttgagtttttttttattttatttaaattttgtttattaagtgaggttatttgggagaagagtggttttggtgggtggggaaaagaaaatttaatagtttaatttttaagttgagcgttttagattatgggttatttagtataaagcgttttatattttgatttatgaggggataatagttggttttataaaggtattatttgtgatttagtacggttgatatttttgttaaggaggagtcggagggtagtggcgaaatagtacgtgtacgattcggatcgtattacggcgatcgatcgatttttaagatcgtttttcgtcgtcgcggaggtttggttaggttttttggtttatagtttttggaaagggtgtggggagagagaaaggaaatgagcgtcgtatacgttggtggagttaaagtttttggatttacggtttgttagcgtttagttgttttattttatagatgggtaaaacggaggttaggttcgcggagtgtttggtttagtaggtgtagtggtttggattttcgcggggtttcgggattgtagggtcgggggcgcgggggggcggcgcggtcgcgggtgggacgtagagtttttgttttgggtttaattttcgggtcggtggttttttgtttttttttcgaaggtcgtttttgataaatttatttatttggggtaaattgttagtgagaaattttcgttcgaattgttttggataaaatcggttgtttgaaaagggtaaatttcgcggttcggcgaggtcgaataatgggtcgttggtgcggttgcggcgggggcggtcgggcgggtcgtataaagggcggattaattggggtcgcggttgagcggttcgcgttagttttatttagttcgcgtcgcggggcgttttattgattgggtttcgagttttattttttataaattttaaataaaagttaattttttttttataaggcgggggagggggtcgcggttaagattttttatttgtttttgcgattcgtttttgtcgtatggggggtttcgggggtttaaggaattggaggtagaagggttttcggggatgttcgagaggggaaagagatgcgggtgtggttgtcgcgtttttgttttttttttcgttgtttcgtttcgacgcgtgtcgtattttttgggtcgtatttataggtaggggttgagattttagttcgaggtttggaagtcgcgaagaagcgggatgaggtggtggtcggatcgaggtgaaggttggggtattcggttgggggaagcgtaggtaggtgatttgggaggaaagaatacgtttttttgatattttaaattttgggaagggtggttatgtattagatagttattgagaaattattgtgttttcgatggcgaatttgtttttaatggatagataagtgggtggggggtagatttataagttaattagttagtaggtgagggatcgcggttagtatggggcgttaaaggaagttattatttttttgtaaaatgatgagatggatttgtcggtgtaatatgtagaagatatttaattatagatatagattttgtatttggagaagtggcggtgattagaaaataaataaataaatttaaattgtaggattaatattgttattggtttatatatttcgtaggaaggaattaggagttcgtttttttttgtttttttttttttaaaataggagaatgattgtagagggttttttagttgatattgagaggagtaggaaatttttttaataatataaatcgatatattttttagtttataagtttttgttggaaatcggattggcggtggttgtata

SEQ ID NO: 165 - DNA, 2567 bp, Artificial Sequence
  chemically treated genomic DNA (Homo sapiens)
ttattgaggcgttatacgtatttaaaaattattattagaaagagaatttgaattttttgatttagagtttggtttattgaatttatttaagttttatttagtgttagatttatttggtatttttttttttttagtgaggaaattttgattaggtttaaggtaggaaggataaatacgagtagagaggtaaaaaaagttagaattaaattgtaagaggtttaatgtggtatttatattaatttattggttttttttaatattatatttatatatagttattcggttttttttttattgtggggtgcgagaggtgatgagtaataatttttggttatgtttgataattttgtagttgttggtttttgagattaagggaatattatttatttgtttttattttgttttaattgggttgtagatttttatgattgggatattatagatataatagatttttttattgaagacgtaggttttttgaaagttattgcgttttagagaaacgtattttagttatatattgtggttaggattataatagaatatgcgtttattgttgagagtatagagatagtttcgaattattattaggttaaaggataaaaaagaatggggtagtggagttattaatgtttattggttttttttaatattgtagtattttattttttttaatttaattttagtaatagggtttcgtttttttaaaatgtagatatagttattgagatatgttatatttatgtttttacgatatagtaagcgatttgtaagttgttgttaattattttgagttggtttatatatttagaggtttgttttgggttgagtagttagatagatgttatggttaggagagatatagatagttaaagtggtgatagttttagtgtgagttagataggttaaaggtgacggtattttgtaaaggtttttcgagtatggattatagtagagaaagggatttttggggtgtttaaagaagattattatttttttggtatatatatttagtttttggggtggattttttgttgtagatataagagagttgttgttgttattgttgttgttgttgtttggtattggtattagagatttgtataataggttattatagcgtatttgtagggtttttttaataacgtttaggtagtatttttttacgatgggtttggttagtagtttttttaagtagttttgattttttttagtgaagtgtatttagcgtacgtatttgaagatttttgtagtattgggatttcgttttttgggagtagtttttagttattgtattgttatatggtatattgtttgtttattttttacgtttagattatttaagcgtaggatagttagtagttgggttagggttagatttgttagagttttttttcgaattgaatttatgtggttgagttgtttgaagttttgagttatataggattgggtttgggatcgtagtttgcgatggttaaaggtatttgtaaatttgaggatggcggtgtagttggttaggttaagacgtcgggttaagaaggaggtataggtttttcgtatatattttagttgtagtatgtcggaggtcgcgtataggcgttttacgttggttttattgagagatatacgattcgtgtagtagtagtcgattaatatttcgaaggattcggcgtttatatcgtgtatggttacgttggtttgttggttttcgtatatgttatttgtgaatatgtttttgaagtagggatatgtcgcggttagtatattgcggttgtaggggaataggcgattcgtgttaggttcgttgttaggcgttattatttcgatggttatattatatagtagtcgcgtatcgtagaaggatttgagttgtgttagtagggttgtagaatgggtcgtgttttttaatttttttggattcgtgaaaaaggtcgaaattgtgggtttgtgaatttttttgggtcgttttttattacggggattggttaggcggcgagagcgcggggcgttttttcgggattgtatggtggagatggcgacgggcgttgatggcgagaaacgttgtaggattcggttttggtttttttttaattttttttcgttgacgttaagatagtagcgttttcgaagagatagtagtacgagtttatttattgaatttaattttatttcgtagaatcgtttttcgttatcgtttagatagtggttgatttatttttttttattttcgcgtttttttttcgcgtttgttcgtttttataggattcgttggtttggagtcgtagaagtcgttattgtagcgtgggcgataatgttaggcgtttaggagaattatcgtttttaggttgtttttcgcgtttcgagggttgttgggattttcggattttcgggtcgagatcgagggaaagaattcgttttgtatgtcgggagtagtagtttgtgtaatatcgcgatttttttttggtgttttttgttttagttgacgatattcgagagcgttaatttttttagattcgattttgtggtttggaattgtggttttggaatttagagtagtcgtttcgttt

SEQ ID NO: 166 - DNA, 2567 bp, Artificial Sequence
  chemically treated genomic DNA (Homo sapiens)
gaacgaggcgattattttggattttaaaattatagttttaaattataaaatcgaatttaggaaaattggcgttttcgagtgtcgttagttaaaataaggaatattagagaaggatcgcgatattatataaattattattttcgatatgtaaagcggattttttttttcggtttcggttcgggagttcgagagttttagtagttttcggggcgcgaaaggtaatttgggagcggtagtttttttgggcgtttagtattgtcgtttacgttgtagtagcggtttttgcggttttaagttagcgggttttgtgaaggcgagtagacgcggagaaaggacgcgggagtgagagagggtgagttagttattgtttaaacgataacgggaggcggttttgcggggtagggttgaatttagtaaatgggttcgtgttgttgttttttcggagacgttgttattttagcgttagcgagggaaggttgaggaggagttagagtcgggttttgtagcgtttttcgttattagcgttcgtcgttatttttattatgtagtttcgggaagacgtttcgcgttttcgtcgtttagttagttttcgtggtgggaagcggtttaagaagatttataaatttatagtttcggttttttttacgggtttagaggaattaaaggatacggtttattttgtagttttgttggtatagtttaagtttttttacgatgcgcggttgttgtgtgatgtgattatcgaggtggtgacgtttggtagcgggtttggtacgggtcgtttgtttttttgtaatcgtaatgtgttggtcgcggtatgtttttattttaagagtatgtttataggtggtatgtacgagagttagtaggttagcgtgattatgtacgatgtggacgtcgagtttttcgaggtgttggtcgattattgttatacgggtcgtgtgttttttagtgaggttaacgtggagcgtttgtacgcggttttcgatatgttatagttggaatatgtgcgggaagtttgtgttttttttttagttcgacgttttgatttgattaattgtatcgttatttttaagtttgtagatgtttttggttatcgtaagttgcgattttaggtttagttttatatagtttagaattttaagtaatttagttatatgggtttaattcgggaggagattttagtagatttgattttggtttagttgttggttgttttgcgtttggatagtttggacgtggagagtgagtagatagtgtgttatgtggtagtgtagtggttggaggttgtttttaaagagcggggttttagtgttgtagaagtttttaagtgcgtgcgttggatgtattttattgaagaagattaggattatttagaagggttgttgattaagtttatcgtgaagaagtattgtttggacgttattgaaggggttttgtagatgcgttatggtgatttgttgtataagtttttggtgttagtgttaaatagtagtagtagtagtagtagtagtaatttttttgtatttgtagtagaaaatttattttagagattgggtatgtgtgttaaggagatggtgattttttttggatattttagagatttttttttttgttgtgatttatattcgggggatttttataaagtgtcgttatttttgatttgtttggtttatattaggattgttattattttagttgtttgtattttttttgattatgatatttatttagttgtttagtttaggatagatttttgggtgtataaattagtttagaatagttggtagtaatttgtagatcgtttgttgtgtcgtgagggtatggatgtggtatattttaatggttatatttatattttgggggggcgagattttattattggagttaagttgaaggaagtggaatgttataatgttaagagaaattagtgggtattggtggttttattgttttatttttttttattttttgatttaatggtaattcgagattatttttatgtttttaatagtaagcgtatgttttgttatgattttagttataatatgtggttgaagtgcgtttttttgaagcgtaatgatttttaggaagtttgcgtttttaatgaggagatttattgtatttgtgatattttagttatgaaggtttataatttagttagggtagaatggaggtaaatgaataatatttttttggttttagagattaataattatagaattattaagtatggttaaaaattgttgtttattatttttcgtattttatagtggaaaaagaatcgggtgattgtgtatgaatatgatattaggggagattaatggattaatataggtattatattaggttttttgtagtttgattttaattttttttgtttttttgttcgtgtttattttttttgttttgaatttggttagagtttttttattgaagaagaagaaatattaagtgagtttagtattgaatgggatttaggtggatttagtgagttagattttgagttaggaagtttaagttttttttttgatgatgatttttgggtgcgtgtagcgttttagtga

SEQ ID NO: 167 - DNA, 10664 bp, Artificial Sequence
  chemically treated genomic DNA (Homo sapiens)
gcgtggggggcgtggttcgaagagattaaatggaggtggaggtatgggttaaattgaattttttaggttacgggaggggtacggttgagggtttttttcgtttttagacgtgatggtgtggtttaatgagcgggttatgggttgggtgttcgggttgggtttgaaggaatttgttacgaattttacggagagcggggtatacggggtattgttcgttttggacgagattttcgattatttcgatttggttttgtttttgtagatttttacgtagaatgtataggtgagttgtcgttgggttcggagtatgttgggcgtttttatttcgtagattgtacgttttaatcgttttttttattttttttttttaggttcggtagtttttggagaaggaatttagtaattttatttttttaggtatagataggcggttggacgaggtgggcgcggtaatagtttagagggttttgtttttagcggtttttcgagaggttgagttgagggggcggggtttgattattaatggttacggttggaggcggggttaggagaggggcggggttaaaggagaggtgagattcggagaggggtggagttaaaggaaggggcggagttagataaggtaggagttttttatcggttgttcggtttttatatttaggatagcgttaagttttttagtcgttttttattttggcggaagatgtttcgggagaaggattttcgaggcgtaattttcgatttagttgagatgttgttttttaattttcgttcggttgtagcgggagttttgggtttttcggggtttttttttcgtaagttgtagttagaaggtggggggtttttaaatgcgatagttttttttcgtttttttagggtggggtatggattattttagtagttcgggttttggaatggtttagttttttttcgtttatttttgaggaatggattgttttaacgtttcggattttttcgttaggatgaaatggataaattttattttttttttttagggcgggagtgaattcgtttaatgcgagtttgagtttttggttgcggggaagggagggaaatttatgtggagttcggcgatcgttgtgatatcgggaagggaagtttaaagggaggaattttggagaggaatagggaggagggtgttttaggttgaatcgttgttcgttttttttttaggttagatttttgggagttttcgggtagacggcgtttcggttcggatttatttttgttagtgtaggtttttaggtgaggatcgtgttgggcgattttgggggtgcggggcggtacggtggatttttattgttttacgcgttgttcggcgttatgtaggtgattttattcggacggaagaattttttcgaggttgggttgtttttttttttgttcggattgtggtttcgtcggggagagcgggcgggggagttcgcgtcgaggattggattatttgtatagattagcgggagtgcgcgcgttcgtttcgtatagggtcggggtttggattaaattatatgaattggattgagagggggaagaagcggggaggaagaaatttcgttttaaacgttcgttttttttttttttattttgtaatttattgattagtttttgttgggagacgggtgttttttattcgcgggaagggggcggggtttttttttcgggtcgtatgcggggagaggttgttttttttttttttttttgtttagtcgcggggtttaagtttttttttttcgttcgaaaggaggggaggggggattcgttgttataagtttcgttttttgtgttatttagtttcgtttcgtcgcgttcggtcgtcggtttttcgggttatttgcgggcgggtttttttttttttttttcgtgtttcgtgttttcggggttttatcgtttttcgtgttgtggtcgtgttcgtgtttcgggggtagggggcgtagaatggcgttttttttttttttttggtttcggggtttgtatgggagaattttttttttacgatgtcgttgggcgacgtggcgtgggggtagggggacggtgggggagttttcgttttcgattttcggtcggttttttcgttttaggcgttatttagtgattacgggtaaagagaattgttttaaaaagtttttttgttgattgattttttttttgcggggggggggggggttgtttaattaattatttcgagttaggagtttaggttttttattttttaagtttaggtttaggtttttagattttattcgtatttttcgatgttttgagatttttagattttacgtttgataatgaggtttcggggagtacgtttattcggagaaataaatatagttcgtggaaaggggttggaaggtagggggaggtatatttgcgtcgtagtcgagcgattgggttagggtttcggcgtttttagtatgtttgttagggttttggagacgagaacgttagaagttagatagttggtgtttaaagtttattttaggacgtttagagattattaatttgtttattttatggacggggaaatggagttttagagttatttgataatttatagcgagataagtatttttttaaacggggtttttatacgttttttttttatatatttattgataaagggacgaggagaaatagttaacgtagttttttgtgggatagtagagaaaagaggtttgaggggtattgtacgagtaaaattaggtagttatttagtatagcgtgcgagattagtgttagttttatttttttttttttaatttttttttttaattgaattttttttatcggatttttttttcgttttgggtgatttcgttttttagtagtttcgttttttcgatttttatttgagttggtttcgtttattaggttttaagttcgtattttaattttttatttatttttgttttttggttttagtaattttatttggtgtttttcgagttaggtttcggtttacgtgtttagagttttggttacgtttttttttttagtttcgttttattagtttatcgggttaggtttcgtttttattaggatttattacgttgggttcggtattttttttaggtttttttagggtttcgtttatgtttatttggagcgtagatcgtttcgtagattagcgggtagagatagtagaattgatagtgttggaggcggggacggggagagagagtgagcgtggggcgtggtcgggggcggagttaggatggggtcgggattagattcggattagaggttaggtttaggttaaggttggagttaggatcgtttgtggagttaaggttgtattaggggtaaggggttgggttagaggttaggatttagggttgggggtttttagagggtttcggtgtattttgaggtttagtggagttttgagtgtgaggtgaggttttatttggtattggtcgtagtgtttatttatgttttttttattatagtgatagtttttatatttagtgtatcgttggggatcgggggagtttggttagatggaaattttaacgttatttgggaggtattcgtttttggtttatttttgtattttggacgtttttttagattttattttttttatttttaatattgagttttgtatttgttttttaaattagttttttttttttttttttgtttttggtttttttttttttttttttttttttttttttttttgaggcggagtttttttttgtcgtttaggttggagtgtagtggcgtaattttagtttattgtaattttcgtttttcgggtttaagcgatttttttgtttcggttttttgagtagttgggattataggtgcgtgttattacgttcggttaatttttttgtattttttagtagaaatggggttttatcgtgttagttaggatggtttcgattttttgatttcgtgtttcgtttattttggttttttaaagtgttgagattataggcgtgagttattatattcggttttgtttttggttttttattttagggcgattttatgtttttttgttagggtgggtttaggtgttttttttattcgttttttgtttattttttttttagtttattagtttttgtgttatttttttttttttcgattttttttgttatagatttttgtttttgtttttatattttaagatgtagtttgggttttgtttttttttttttggattattgttttagttttttagtttttagtttgtttttattttatatgtttgtagaaggatttttttttttttagaattgattttggtttgtttttgttttgagtttttttatagtattattttagggtttttgggatagattttggggatattttggtgggtggatttgggttggggatatatattgtagaaggagtagtagttatatagggattttggttggtagtttttatatttttgagtattttgtggatttgcggggataggagggtagtagtgatttaggttgattcggtttttttttatttatattagtttaggttatttatttgtgtttttatcgttttttttttcgttggaggtatttttagtttttttttttttgtttagtgggttggggatgatggtgaagcggggtttatttttttttagttttttttttttttttttttttttttcgttgtggtttgggtttagtggggttttaattttagtttttttttttttttttttttcgttttttttttttttttttttttttttgttttttttttttttttttttttggtttaggttgaggttatgatttttttttttattttttttatttttttggtttcggttgttatgatgggtgtttttttttttttgttttgaatttttatcgttttttttatgggagtcggggttttttttttttttttttttttttttagaattatttttttttaaatggtttttatttttgattattgtgtgttttggggggtgatggtttatttttttgatggattttttttgattatggttagtttttttattttggtggttttgtttgtggttgggggtttggtggttaagtttagtagagatttttttatttttttttttggggattttgtggtggtgatggtgagggatttttgttttatatttattttggaagttttttttattatttttgtggtttcgaggttggtggtttgtaatatagtggtcgaattggattgtgattttttttttttttttttttttatttataaggttatggtggatatgttggggattttggtgttaacgtttagtggatatatttttattttttttttcgtttttgtggttttggtgtttgtggttagggatatgatggtggtgtttatttgagatagttttaatttttttttttttgtggttttggtgtttgtgggtttggtgtttatatttagtggagatattattattattattgttattttttttatggtttcggtgtttgtggttggggtcgcgatgatggtgtttatttgagatatttttattttttttaatttcgtggttttggtgtttgtgagtttggtgtttatatttaatggagatattattattattattattattattattattattattattatcgttattttttttatggttttggtgtttgtggttggggttatgatgatggtgtttatttgagatatttttattttttttatttttatggtttcggtgtttgtgggtttggtgtttatatttagtggaggtttttttttttttttttttttttttttttttttttttttttttattattttttttattatggtttcggtgtttatgtttgaggatatgatggtgatgtttattggatataattttatttttattttcgttttgatggttgtggtttttgtggttggggaggtggtgtttgtgtttagttgagtttttcgtgtttttattttcgtggtttttgtgtttacgggtttgtttattatgttttgtaaagatttttttatttgagatatttttattttcgattttgtggttttgggatttgtggtttgggagtaggtgtttatattttttggagatatttttatttttttttttacggtttgggtggttttagaaatgatgtttattttttgtggaaatatttttgtttttatttggatggtttttagggttgtggaggtggtggcgaagttttgttgatgttttttcggagagttcggcgattttagtgttgttgtttcggtttttgaagtttagtttattttttttgagttgttgggttatggtcggggggaggagtaggttggttattttagtttagaggatagaagcgtgtagttatggtttatggtggtttatggggacggataggtagtattggttttagttgtttttgcggtaatgtggataaacgttggggtttttgtttttttggggttggtttttttttttttttgtgttttttttttgttttttcggtttttgtttatttttttttggtttttgttgtttggttttggatatttttttgaggttgttttcggagttttttgatttttttttggggttttttttttttattttttagttaatagggtttttttttttttttttttttagttaaatttatttttagttttgagttattttgggttagttttcgtttgtttgttttttgttttttttttttttagttggggaggggattagtgaggggtttttttttggttaggagacggtggttaagggatttgattttgaattattaataagtttacgtttggtagttgtaaagataaaggttagatttttagtaggtttttgggggagtttggggtatttgggggaggtagaagagatttattagaggggagagatttttgggacggaaggattgggggttcgattgcggggtgtttttagttggaatgatacgtgttggtgagagagtgatgttagtattgaggttttagaatggggggaaaggaatatggtttttaatatacgtgtttatgattttttgtttttggaatttagatttgggggtagggattgggttaggttagggttataaatatagttgggaggggtagggggatttaggttacggaggttatagttgtttttattatagagggttggtaggagataagtggttttgttcgtttttgtgtgttagtattttttattttttattttttatgattgtttttattagggtttttttttttgtttacgggtttttttttttttttaattttgttatttgtttttttagggtttttgttttttttttatgggattgttttttttttttattttgggtttttgttttatttttattttagtgttagtttttttttaagtttgtgttttttttttttttttaaatttttggttttttttttttgagtttttgttttttttttaattttttggtttttgtatttttttttgttttttgttttagttaaggtgttttttttttatttttggtatttatttttttgggtttttgtttttatttttttttagagtttttgtttttttttgttttagagtttttgtttatttttttttgggtttttgtttttttttttttgggtttttgtttttttttttttgggtttttgtttttttttttttgtggatttttgtttttttttttttgggtttttgtttttttttttttgtgggtttttgtttttttttttttgtggatttttgtttttttttttttgggtttttgtttttttttttttgtgggtttttgtttttttttttttttgggtttttgtttttttttttttgggtttttgttttttttttttagggtttttgtttttttttgttttagagtttttgtttttttttttttgggtttttgttttttttttttgggtttttgtattttttttcgtgggtttttgttttttttttttgggtttttgtttttttatttttgggtttttgtttttttttttttgggtttttgtttttttttttttgggtttttgtttttttttttttttgggtttttgtttttttttttttgggtttttgtttttttttttttgggtttttgttttcgtttttttgggtttttgtttttttttttttgggtttttgtttttttttttttttgggtttttgtttttttttttttgggtttttgtttttttttttttgggtttttgttttcgtttttttgggtttttgtttttttttttttgggtttttgtttttttttttttgggtttttgttttttttttttgggtttttgttttttttttcgtgggtttttgttttttttttttgggtttttgtttttttttttttgggtttttgtttttttttttttgggtttttgtttttttttttttgggtttttgtttttttttttttgggtttttgtttttttttttttgtgggtttttgttttattttttttgggtttttgttttattttttttgggtttttgttttttttttttgggtttttgtttttttttttttgtgggtttttgtttttttttttttttgtttatttttgggtttttgttgttttattttttgattttttgttttttaagtttttgtttttttttttttgggttaaattgttttttttttgtttggtatttttttttttgagtttgtttttttttcgttattggtttttaattttttttgtttttatttcgcgtttgtttttggagttttttttgtgtgttttttttttttcggttcggatttttgtattttttaggtcgttgtttttttgtttttttatcgcggtttgggattcgtttttttttcgtttttcgttttggcgtttttaagatttttcgttttttagatttcgtttcgttttaggttaggttggaaagtggaggattcggtttgttttgggcgggtttggaagtagagtcggcggagggagcgtcggggttttgggttgtaggaggttgcggcggtcgcggtagtatggtggtgtcggagaaggagtaggtgagcgtcggattagggtttgcgggagcgcggagttggggatttcgtttttaggtttttagagaggagggcgttggatatttagatttttgggttagacggaggagggggatgggagggtttaggttttagggtttagggtatgggggtcgagatttttgagtttggagcgggagggcgttgggggttcggatttttgtgttcgtggggagcgtacggggtgggtggttttgtgttttataggatagaattgggtgtttttttattttatttttatttttatatttgtttttgtttttagagttggatttttaagatttttaagaagaagatttgtacgacgtttatagttgattttatagattcggggtgaggagttcgtttttggattgattttagagggttcgcggttcgttgatttcgttcgcggatggttacgttttagttttgttttttttttatttttggattcggggatttttttaagggcgttttttgtcgacgttttttttttaggagcgtttgggtttgtgtagatattttttattttttattcgttattttttcgtttagggttagtgtagacgttttagggttcggttttgtttttttttttttcgatgttttttttatgtgtttttgttttttcgtgttattttttgtgtttttgttttttttttttgggtatttttgttttatttatttatttatttatttatttatttatttatttatttatgtaagaaatttttatttagcgtttttaaggtttttttagtttaatttaacggttttgttagggttttaattttttttgggatacgtgttgtgtggtttcgggtaaattattttatttttttgggtttcgttttttatttgggtattaaaagaggtttgattttttggggttattatgagaattaaataagttaatgtttgtgatatttttggtatagcgtttagtataggacgttgggaaatatttgtagtttttattgggaggtggtaattattatcgcgggcgggttttgttttggtggtcggggatattaattgagttagatagggtgtgtgcgttcgcgaggagttttcgttttttagtgacggttttttaagcggatttaggttttttagtttttttttttttttttttttttttgagacggtgtttcgttttgttttttaggttggagtgtagtggcgcgatttcggtttattgtaagtttcgtttttcgggtttacgtcgtttttttgttttagtttttcgagtagttgggattataggcgttcgttattacgttcggttaattttttgtattttagtagagacggggttttatcgtgttggttaggatgatttcgattttttgattttgtgattcgttcgttttagttttttaaagtattgggattataggcgtgagttatcgcgttgggttaattttttgtattttttttttagtagagacggggttgtatcgtgttagttagatggtttcgattttttgattttatgattcgtcggtttcggttttttaaagcgttaggattataggtgtgagttatcgtatttggtttaggttttttagttttttgttttttgtttttttgagatagagtttggttttgtcgtttaggttggagtgtagtgttgcgata

SEQ ID NO: 168 - DNA, 10664 bp, Artificial Sequence
  chemically treated genomic DNA (Homo sapiens)
tatcgtaatattgtattttagtttgggcgatagagttagattttgttttaaaaaaataaaaaataaaaaattagaaagtttgggttaggtgcggtggtttatatttgtaattttagcgttttgggaggtcgaggtcggcggattatgaggttaggagatcgagattatttggttaatacggtgtaatttcgtttttattaaaaaaaaaatataaaaaattggtttagcgcgatggtttacgtttgtaattttagtattttgaggggttgaggcgggcggattataaggttaggagatcgagattattttggttaatacggtgaaatttcgtttttattaaaatataaaaaattagtcgggcgtggtggcgggcgtttgtagttttagttattcgggaggttgaggtaggaaaacggcgtgaattcgggaggcggagtttgtagtgagtcgagatcgcgttattgtattttagtttgggggatagagcgagatatcgttttaaaaaaaaaaaaaaaaaaaaaaaaattagaaagtttggattcgtttgagaggtcgttattgaagggcgggagtttttcgcggacgtatatattttatttagtttaattggtgttttcggttattaagatagggttcgttcgcggtaataattgttattttttagtgggagttgtagatattttttagcgttttgtgttgggcgttgtgttaggaatattataagtattaatttgtttaatttttataataattttaggagattaagttttttttgatgtttagatgagaaacgggatttagagaggtgaaatgatttgttcgaagttatatagtacgtgttttaggggaaattggaattttggtagggtcgttgaattaggttaaagggattttgggagcgttgagtgagggttttttgtatggatggatgaatgaatgaatgaatgaatgaatgaatgaatgaaatagaaatatttaaaagggaaagatagagatatagaaagtgatacgaagagatagaagtatatagaagagatatcggggaggaaagaagtagaatcgagttttggagcgtttatattgattttgagcgggagaatggcgaatggggaatgaggggtgtttatatagatttaaacgtttttagagggagagcgtcggtaaggaacgtttttgggaaggttttcgagtttaggaatggggaaggagtagggttggggcgtgattattcgcgggcggggttagcgggtcgcggattttttggggttagtttaggggcgaattttttatttcggatttgtggagttaattatgaacgtcgtgtaggttttttttttgaagattttggggatttagttttggggataggaataaatgtaggggtggaagtggggtgagagggtatttagttttgttttatgggatatagagttatttatttcgtgcgttttttacggatataggagttcgggtttttagcgttttttcgttttagatttaggagtttcgatttttatgttttggattttggaatttggatttttttatttttttttttcgtttgatttaggaatttgggtgtttagcgtttttttttttgggagtttggaggcgaggtttttagtttcgcgttttcgtagattttggttcggcgtttatttgtttttttttcggtattattatgttgtcgcggtcgtcgtaattttttgtagtttagggtttcggcgtttttttcgtcggttttgtttttagattcgtttagagtaaatcggattttttattttttagtttagtttggggcggggcgaggtttggggggcggggagttttggagacgttaaagcgggaggcggggagagggcgggttttaggtcgcgataaggggatagagggatagcgatttggggggtgtagaggttcgggtcggggggagagagatatataggggagattttaagggtaagcgcgagatgggaatagaaggagttgggggttagtggcggagagggaatagatttagaaaggaggatgttagatagggaggggataatttaatttaaagagggggagataaagatttaggggatagagaattagaaggtggggtagtagggatttagggatagatagagagagagggggatagagatttatagagagagggggatagagatttagggagaggggatagagatttagagagagtgggatagagatttagagagagtgggatagagatttatagagagagggggatagagatttagggagaggaggatagagatttagagagggggggatagagatttagagagggggggatagagatttagggagggggggatagagatttagggagaggggatagagatttacggagagggggatagagatttagggagaggggatagagatttagagagagggggatagagatttagagagagggggatagagatttagagagacggggatagagatttagagagagggggatagagatttagagagaggggaatagagatttagagagagaggaggatagagatttagagagagggggatagagatttagagagacggggatagagatttagagagagggggatagagatttagagagaggggaatagagatttagagagagaggaggatagagatttagagagagggggatagagatttagagagggggggatagagatttagggatggggggatagagatttagggagaggggatagagatttacggagaggggtatagagatttagggagaggggatagagatttagagagagggggatagagattttgagatagagggggatagagattttgagagagggggatagagatttagagagaggggaatagagatttagagagagagggggatagagatttatagagagaggggaatagagatttagagagagggggatagagatttatagagagagggggatagagatttatagagagaggggaatagagatttagagagagggggatagagatttatagagagagggggatagagatttagggagagggggatagagatttagagagagggggatagagatttagggagaggtggatagagattttgagatagagggggatagagattttgagagagagtggggatagagatttagagaggtggatgttagagatggggaggagatattttgattgaggtaaggggtagagggggatgtaaaaattaaagaattgggggaagggtaggaatttagaaaggaggggttagagatttaggggagagagagggatatagatttgggggaggattgatattaagataagagtgggatagaagtttagagtgagagggagaggtaattttatggaggagggatagggattttgagagagtagatgatagaattgaagagagaggaggattcgtgaataggaaaggagattttagtgggggtagttatgaagggtgaggagtaggaaatattgatatatagagacgggtaaggttatttgttttttgttagttttttgtgatggggatagttgtggttttcgtaatttgagtttttttattttttttagttgtatttatagttttggtttagtttagtttttgtttttagatttgagttttagggataggaggttatgggtacgtgtgttgggggttatgtttttttttttttattttagggttttaatattgatattatttttttattagtacgtattattttagttggaaatatttcgtaatcgaatttttagttttttcgttttaggagttttttttttttgataagttttttttgttttttttaggtgttttaggtttttttaaaaatttgttaaaagtttagtttttgtttttgtagttgttaaacgtgagtttgttggtagtttaaagttaagttttttggttatcgttttttggttagggagagattttttattggttttttttttagttgggaggaggaggagtaggaggtaggtaggcggggattgatttagaataatttagggttgagagtaaatttagttggagagaggggaggggaaggattttattggttggggaatggggagggagggttttagaggggggttagggggtttcggagatagttttagaggggtgtttagagttaggtagtaaggattagaggaaggtggatagagatcgaaaggataaaggagagatatagagaaaaaaagagattaattttaaagggataaagattttaacgtttgtttatattgtcgtagaggtagttggagttagtgttgtttgttcgtttttatgggttattataggttatggttgtacgtttttgttttttgggttggggtggttagtttgttttttttttcggttatgatttagtagtttagaggggatgggttaggttttagaaatcggaataatagtattggagtcgtcgggtttttcgaggaggtattagtagagtttcgttattatttttatagttttagagattatttagatgagaataaggatgtttttatagagaatgggtattatttttggagttatttagatcgtgaaaaggaggatgaagatgtttttaaggaatatgggtatttatttttaggttataggttttaagattataaagtcggagatgagggtgttttaggtgaggaggtttttgtagagtatggtgggtaggttcgtgggtatagaggttacgggagtgaagatacggaagatttagttgagtataggtattatttttttagttataggagttatagttattaagacgaggatgaggatgaagttgtgtttagtgagtattattattatatttttaggtatggatatcgaggttatgatggggaagatgatgaaggagaagaggaggaggaggaggaggaggaggaagaggaggtttttattgagtatggatattaggtttataggtatcgaggttatgggagtgaagaggatgaggatgttttagatggatattattattatggttttagttataggtattaaggttatgaagaagatgacgatgatgatgatgatgatgatgatgatgatgatgatgatgatgtttttattgaatatagatattaggtttataggtattaaggttacgggattgaagaggatgaagatgttttagatggatattattatcgcgattttagttataggtatcgaagttatgaagaagatgataatgatgatgatgatgtttttattgagtatggatattaggtttataggtattaagattatagaaaggaagaggttgaggttgttttaggtgaatattattattatgtttttgattataggtattaaggttatagagacgaggaagaagatgaggatgtgtttattgaacgttggtattagggtttttaatatgtttattatggttttgtagatgaggaagaggaagaagaggagattatagtttagttcggttattatgttgtaagttattaatttcgaggttataagagtgatgaagaggatttttaagatgagtataaaatagaagttttttattattattattatagagtttttagggaggaagatgaggaggtttttgttgagtttggttattaggtttttagttataggtaaagttattaagatgaagaaattggttatggttaaagagggtttattaaagagatgagttattattttttaggatatatagtggttaaggatagaagttatttgaggaaggatgattttgaggaggaaaaggagaaggaagaggatttcggtttttatgaggaagacgatgaaagtttagagtagggagagaaaggtatttattatggtagtcgggattaggaagatgaggaggatgaggaggaaggttatggttttagtttgaattaggaggaggaagaagaggaagataaggaggaggaggaggaggaagaagacgaggagaggagggaagagagggttgaggttggggttttattgagtttagattatagcgaggaggaagaggaggaggaggaggggttggaggaagatgagtttcgttttattattatttttaatttattggataggagagaggaggttggaggtgtttttagcgaggaggaaagcggtgaggatataggtaagtggtttgggttggtgtgggtgggaaggaatcgagttagtttgggttattgttgtttttttgttttcgtaggtttataggatgtttaggagtatgggaattattagttagggtttttgtgtggttattgttttttttgtaatgtatgtttttagtttagatttatttattaaggtgtttttagaatttgttttaggggttttggggtggtgttgtgggagggtttagagtaagggtaggttagggttagttttgaaagaaaagagatttttttgtaggtatgtgaggtgaggatagattgaaggttgggaggttggggtagtggtttaggaaggagaggataagatttaagttgtattttggggtgtggggatagagataggggtttgtggtaaagagagtcgggggaaggagggatggtataggggttgataggttagggggagaataggtagagagcgggtggagagagtatttgagtttattttgatagggagatatggggtcgttttgagatagaaaattaggggtagggtcgggtgtggtggtttacgtttgtaattttagtattttaagaggttagggtgggcggaatacgaggttaggagatcgagattattttggttaatacggtgaaattttatttttattaaaaaatataaaaaaattagtcgggcgtggtggtacgtatttgtaattttagttatttaggaggtcgaggtaggagaatcgtttgaattcgggagacggaggttgtagtgagttgaggttgcgttattgtattttagtttgggcgatagagagagatttcgttttaagaaaaaaaaggaaaaaaagggaaaggaaggaaattaggggtaggggaggggaggggaggttggtttggggggtagatatagagtttagtgttagagataaagagggtagagtttggggaagcgtttagggtgtaggggtgggttaggggcgggtattttttaagtggcgttagagtttttatttaattaggttttttcggtttttagcgatgtattgaatgtgagagttgttattgtgatgaggagaatatgggtgagtattgcgattagtgttaggtgagattttattttatatttaaggttttattgggttttaggatgtatcgggattttttgaggatttttagttttaaattttggtttttgatttaattttttatttttgatgtaattttgattttataagcgattttgattttaattttaatttagatttagtttttggttcgggtttggtttcggttttattttaatttcgttttcggttacgttttacgtttatttttttttttcgttttcgtttttagtattgttagttttgttatttttgttcgttggtttgcgaaacggtttgcgttttaggtgagtatgggcggggttttggaaaaatttgaggaaggtgtcgggtttagcgtggtgaattttggtgggggcggagtttggttcggtaggttggtggggcggggttaagaggggaggcgtggttaaggttttgagtacgtgggtcggggtttggttcgaggaatattaggtggagttgttggagttaagggatagaaatgagtggagggttgagatgcgggtttagagtttaatgggcgaggttaatttaagtaggaatcgaaggggcggggttattggagaacggaattatttagaacgaaaaaggggttcggtagaagggatttagttggaagaaggaattagggaaaaggaggtggagttagtattaatttcgtacgttatattgagtggttgtttaattttgttcgtgtagtattttttaagttttttttttttgttgttttataggaagttacgttgattattttttttcgtttttttattagtaagtgtgtaaaaggggagcgtgtaaaagtttcgtttagagaagtgtttgtttcgttatgagttattagatgattttgggattttattttttcgtttatgaaatgggtaggttaatgatttttaagcgttttggggtgggttttgaatattagttgtttaatttttggcgttttcgtttttagggttttggtagatatgttggaaacgtcggaattttgatttagtcgttcgattgcgacgtaggtgtatttttttttgttttttaatttttttttacgagttatatttattttttcgaataaacgtgtttttcgaaattttattgttagacgtggggtttgggaattttagggtatcggggaatgcgggtagggtttagagatttggatttagatttgagggatgaggggtttggatttttggttcgaggtggttggttgaatagtttttttttttttcgtaaaaaaaaaattagttaataaggaagttttttgaaatagttttttttattcgtgattattgagtgacgtttggggcggggaggtcgatcgagagtcgggggcgagggtttttttatcgtttttttgtttttacgttacgtcgtttagcggtatcgtggaaagaggatttttttatgtaaatttcggagttagaggagaaggggaagcgttattttgcgttttttattttcggggtacggatacggttatagtacggggggcggtgaggtttcggggatacgagatacgggggagggagaggggaattcgttcgtagatgattcgggggatcggcgatcggacgcggcggggcggagttgagtggtatagggggcgaggtttgtagtagcgagttttttttttttttttttcggacgaagaaggaagatttgggtttcgcgattgggtaggaaaaaggggagggagtagttttttttcgtatgcggttcgggagggaagtttcgtttttttttcgcgggtaaaggatattcgttttttaatagaaattgattaataaattataaagtagagaaaaggaaagcggacgtttggggcgggattttttttttttcgtttttttttttttttagtttagtttatgtggtttggtttaggtttcggttttgtgcgaggcgggcgcgcgtattttcgttggtttgtatagatggtttagttttcggcgcgagttttttcgttcgtttttttcggcgaggttatagttcgggtaggagagggaatagtttagtttcgggaagattttttcgttcgagtgaggttatttgtatgacgtcgggtagcgcgtggagtagtgaagatttatcgtgtcgtttcgtatttttaaggtcgtttagtacggtttttatttggaggtttgtattagtaggaataggttcggatcgaaacgtcgtttgttcgggaatttttagaagtttggtttggagggagagcgagtagcggtttagtttggagtatttttttttttgtttttttttaggatttttttttttggattttttttttcgatgttataacgatcgtcgggttttatatgggtttttttttttttttcgtagttaaggatttaaattcgtattgggcgagtttattttcgttttgggaagggggagtgggatttatttattttattttgacgggggagttcggaacgttggagtagtttattttttaggggtgggcgagaaaggattaggttattttagaattcggattattgaggtggtttatgttttattttagggaagcgaggaagggttgtcgtatttgggagttttttattttttggttgtagtttgcggagagggagtttcggagagtttagggttttcgttgtagtcgaacgaaagttggggggtaatattttagttgagtcgggagttacgtttcggaggtttttttttcggaatatttttcgttaggatggggagcggttgaaagatttggcgttgttttaggtataggagtcggatagtcggtgagggatttttgttttgtttgatttcgtttttttttttgattttattttttttcgggttttattttttttttaatttcgttttttttttggtttcgtttttaatcgtgattattaatagttaggtttcgtttttttagtttagtttttcgaggagtcgttgggagtagagttttttgagttgttgtcgcgtttatttcgtttagtcgtttgtttgtgtttaaggagataaggttgttgaattttttttttagaagttgtcgggtttggaaagaggaggtggagggggcggttggagcgtgtagtttgcgaggtggggacgtttagtatgtttcgggtttagcggtagtttatttgtgtattttgcgtggggatttgtaggagtaaggttaggtcggagtagtcgaaggtttcgtttagggcgagtagtgtttcgtgtatttcgtttttcgtgaggttcgtggtaaatttttttaggtttagttcggatatttaatttatgattcgtttattggattatattattacgtttggggacggaagggatttttagtcgtgtttttttcgtggtttggagagtttagtttagtttatatttttatttttatttggttttttcgggttacgttttttacgt

SEQ ID NO: 169 - DNA, 22069 bp, Artificial Sequence
  chemically treated genomic DNA (Homo sapiens)
tatcggtgttgcgagagaaattttgagcgttggtcggtgagttaggtttagatggggttagatggggcggtcgtattaggttaggttttttttaattttgaattcgacgttgggtagagaatagttttattatttcgtagtttagggcgtagattttcgggtgggtgttttttgagagtttttttttaaaggtttttacgaagtttttaaggcgtttttttcggttattttgtacgtgttgttgggggtggagaaggtaggtgagggtagtttcggggtgtagtgggggcgggggtggtagtagtagtatatttttgagtttttcgggattattttatttatttattacgtttatttattggttgggattttggtgagtaggtggggaagggggtttgttaagaagatatagggaggacggttttttaggatgggaagtggttagggatagggtttggggtttacgggtgttacgttttttgggtaatataagaaaggttgttcgggggtttagattttgagtttaggattgtgttgtgtttcgagattttatattaacgatggggaggtagaagtttgttgagaataggtagaggggattgggacgttagggtttatttttgcgatttggtagtcgatagagtcggcggtagtcgagtagtatatgtattgggttttttagttttcggttattgtaggggatatagatatatagttagggttcggttaggtttattttatagttttcggggtattgattatttgtatttatcgagttttattagggagtgaggattgaggataggaggttttagttttttggtggagttggaagtagattaggtttcggtagtcgtgtggtagttaggacgtttaggtttggatttagggagattagtgttttttgtagaggttttttggtagcgttgtttcgggtagtattttttaggtatttttgaggcgatggttttaggggtcgttatagggttgtgtaaggttggttatgtgttttgagcgtggttgcgtggttgtttgggggattgaatagaattattaggttaagggtgggataagttttttcgtttttggggttagtaatttttatatttttatggattaagggtataggaaggtagggatatagggttttttaggtggtggtatttgaattttgttatgggaaagtttttgttttatttttgtataaagaataggtggagagaaaatgaggttaagggttagtttcggttttgttaaagacggtgtagtttagggattttgagtgggatggagggtttgggtaaagttttattttagttttgggggttttaagggagggtttaggtttcgggggttatgggtgggaaggggaaggattcgggtaaggttttatttcggtttcggcgtagtcgtttttagtggtaataatatttttcgtttcggatgtagcggtttgaagaggatacgaggtattcggtgttatagcggtagtaggttttgtaggaagttgtgggtggggatttaggtggaagttgaggtttacgttggggttcgtatgttcggttttgtttatatttcgtatttgtttatttaggtcgtcgtaggttagcgatttatagtttttgggttttttttttttagttgtgaagatgattgcgttttcgggtcgttttgggtgcgggaaggggtagtcgttttttttgagttggttttgggtgagtaggtattttttgaggcggttgtatagggtagtttttgtggataggtatagtggttagtttttgtttgggatggtttacggggcggtagatattatcgggaaaggcggttgggtcggtaggggtttacgaagtatcgtgtggtatagtaggggttgggtcggtagaggtttacgaagtatcgtgtggtagagtaggggtagggttttattttttaggttttttattcgggggttgtttggacggttgagcgagaagttggttttggcggttaatttgttttttaatattatttcgtgggatataattttgcggttattggtttttggaaggaagggagggaggggaggagggtgtgaagtagttggtttagatttttgtttcgtttgtttttttatttattttgttttttttagatttttgttttaattttttttttttgggatagtattttattgatttcgggttttagtttgattcgaataggagaggtagatatgcggtgagttagggacgtagggtagtcgttagttttgtaggttttagagttgtacggaggttttatatttaaagttttcgttttttttttttaagcgaagggggaagggcggggagaatagtacgggggatttaatggttttcgagggttttgagtttttatgggttatttagtttgcgacgttaatttagggttttttcgagtgttaatgtaggcggggacgggggtaggggtcggtgatagtttaatgtagtttggagaggttgtaatgaaacgtttaggttttcgttttttttttttttagagtttaatgtatggagttcgtttagttttgggttttttgttttgaagaagttgtcgtagttttattagtaggcggtttttcggttcggtttggagattttatttagcggaggaaggcggttgatagcgaggatattagggttaggttcgttttatatagaagtttgggaattaggtagtaggtagtttttttatagtatcgcgttttttttttgtttgagattgtggttgagtttagggttgtgaaggttttagcgagggttttagtttagttgttattttaagagtaattttgagtttttttcgtttattcgttaggatttattgttgaggtcgggtatagcgttgggggttaggtttttgagttttttgagggtgtttacggttatatttaggtagatgtttttgttggggttgcggttataggttatttttttttcgtttagtgtttgggggataggcggtgtttagttgaggttatgtttgtttggtgtcggggagttttagcggtggggtcgttatggggtcggggatttgtattttttttaggtagtttcgggttatagttgcggttgagaggtcgggggatgtttggggattattttggatttttagtttttattcgatcggttagataggaattttaggattttattttttttatggttttttggttggaggtatagaatttgagatatttttcgatgaataggttgagatagcgttggcggatgacggtggggattttgtttttaaattttttggggataatgggtttttttaaattttagagggaaggtaaaagttgttatgggtgagggtttttataaggtttttagcggggaacgtagacgcgatgaggtcgtgtttatggttggaggtaagagtgaggtgcgttgggatagattagtttggttgtagtagggatagatacgttaaggtaagataggagtagtaggggaaattgagggtagcggaattaaggttatgggaaattgaggttatgggggtataagggaatttgttgtattttttgtttaatttttttagaaatttaaagttgtttaaaaaatataaagtttattaattaaaaataaaataaggttaagcgtggtggtttacgtttataattttagtattttgggaggttgaggtaggaggattatttgaggataagagtttaagattagtttggataacgtggtaaaattttgtttttataaaataaaaaataaaattattagttggggtgtgatgatatcggtttgtggttttagttatttaggaggttgaggtggaaggattatttgagtttaggaggtcgaggttgtagtgagttatgattgcgtttttgtattttagtttgggtaatagagattttgtttttaaataaaaaaaaaaaatattaattaattaaaaaaataaaataagataaaataaaaaaatatcgttagggcggtcgggtatggtggtttacgtttgtaattttagtattttgggaggtcgaggcgggtggattacgaggttagaagatcgagattattttggttaatatggtgaaatttcgtttttattaaaaatataaaaatagttaggcgtggtggcgggcgtttgtagttttagttatttaggaggttgaggttagagaatggcgtgaatttaggaagtagagtttgtagtgagttaagatcgtgttattgtattttagtttgggcgatagagcgagattttattttaaaaaaaaaaaaaaaatattaaggtatggggagggaaggtgaaggttgtattgcggtgtggagtacgaaggttcgtagggtaggggcgaggttggtttttcgtaggttttatgtggtcgggttttagggcgtggttttgggggtggtggttttggtcgagatgggaggggttatttgtaaggatggattgtgggcgattcgtttagggatgatggtggtggtagttttggacgttattttcgataatgtgcgtgtttttagttgttggttatttggtttagggtcgttggaggattggttgtcgttggtcgtaagggtttttttggtatttgtgggggttggcggggtatagggggtgtgggtatagggcgagtggttgtttattattacgtggcggagtattaggtagtcgcggtcgtttagcgttagtagtacgtgtattttcgcgtgtagggggtcgggttagggtgaggggttggggttgcgtaatggtattaggttttagttgtttttaggtaagtttatcgaggtagaggatataggttaggttgcggaggtcgttgaggatacgttatcggtggggtggtttaggtttttgttacgtgttttgattttaagtttaaggcgtcgatgtttgagggaaaggttttggttttcggatagaggatcgaagggtttcgggtgtttttatttgtttattggttttgttttgttttgcggtttttgtgttttgttttgttttttgatgaagttataaattagagggaggaggttaggtttgtaggggttgtttcggagggttggttacgcgggtagttgtaatttgggtatgtacgtttgtgtggtaggggggtttttggattgggggttcggtatcgatttaggaaggggagttgtgagtagggatatttggttttagttttagagtaatatttttcgaaatgttatttggttttggaaggtgtaagggaggtaggatgagtttgtttatgttatcgcgggtcgtttagtaaggaagtaggttgttcgttaggttggtacgcgttttttgtagtggagggtttgttttttaggaacggatagagaatttttagattttttcggttgtacgttgggggcgagtttaggtagttataggagttttttaagttagatgagttcgttttgcggtattgttagtatttgggacgttagattttttttaggcggcgggttttaagggtattgcgatagtttagtatttattatagattagtaataggataattcgagcgcggagatatagacgggaagcgtgtggggttttgggataggtttaatttaatgattttttttttttggggttaaggttttagtcgtgagggggttttggggaggggaggttagagtagtttggagagttttttttaaggagggtcgtgggatttatgggatttgtaggggaatcgtcggggttggttttaaggttttttagttagcgttagggaggtaggggttttaaattagtaggttgtttagggtggttttcggatagtagttatgtttttttagggagtttgttagatatatagattttttttagtttttagattagaatttgtattttttaggagttttttgggggatttttatttgtgatttgtttttagggatattttttcgttttatagatattattgatgtgaagacgtaggagataggataatttttcgtgaagggttttgtttatttattattgaggtttggttcgattttttataagattttgttgggggggaagtgtttttcggagtaaaggaaatatagttttatttttgggaagatagtatttatttttattagaggttacgttttttatttatacgttaggagaaagttatatttgtagaagtttgttttttatttaatgttaggtatttcgatatggttttttattttttggaattataggtttaggttttggtttagtttagtttttagtaggttgttggatttttagtaatttcggagttgggttagggaaggaaggtgttgggttaggttttttgtattttttaatagtttttattttatagataggtaggttgagggttttagggagggggtttaaagttattttatgagtaagtattatgtggtttaggtgagtttagagattttagggtgttattttttttgtttatatgtttacggtttttcggtataggttttttgggttaggatttatttgtagttaggcgggggttggggatgtgggcgattttttttttttcgttaggggcggaaatgtggacggagggcgatttttttgttagtttggcgggggtttgtagtaagttcgtcgatgttttttgcgtttgttgggttcgtaggtagtatattttttgcgtcgtcgggggtcgggtcgggggtatcgcgggattttttttcgggggttttatttgcgttattataaatgttaaggtttggtagtatagcgggggtatttggagtaggcgatttcgggtaggtttgggagagggtggttggagttcgggggtcggaggtattatttttttggttgttttttgagttgttgggtatattggggggaagtagtagggggtagtggtttttaatgttatgtggttttaggtttttttatttttagtgtttttcggtgtttaggttatgtttttagttttgataaggtacgggtgggcgggattatttcgattatattggtattttaatttaattttattacgtttaattttttttaaagttttttttttggggaggttttgggattggagtaattgggatttttttggttgttgatttcggagttaggttttttgtttgttttgtattatttcgttacgtttgtataggggtttgataagcgttattgttttcgggttatagaggatattggagtttagagttggataatcggtttaggtttaggtcgtatacggcgtagtaggtcgtttgtcgtattttgggggaggttattttggggttgttgatttgttttgtttttcgttttagtatcgtggtaatttaataggaaggggtagggttagttttttttggaattcgggtagcgttaaagataaggtgtttttaaaaagtttatggaaaacgtgcgttgtgacgaaatttgtatggtttttaagtttttttgttttaaaataaattgatattaatttgttataatatgtttgaattagacggagtttgaggtattaaaaaaaagtaagatattagttagaatagagttttagttagagtaataggagttttgttaaaattgaagtaaatgttaagtattaaatttatggtaaaatttgggtggaagaacgaatggggaaattattgatgttttataaaaagcgttatagatttataggaataatgttttaaagaaattagaagtttatgaatggataatttattttatgtatttatttttttgagatagagttttgttttgtcgtttaggttggagcgtaatggtacgattttggtttattgaattttttatttttcgggtttaagtaatttttttgttttagtttttcgagtagttgggattataggtgcgtgttatcgcgtttagttaatattttgtatttttagtagagacggggttttattatgttggttaggttggtttcgaatttttgatttcgtgatttgtttatttttgggcgtagtgttttatgtttgtaattttagtattttgggaggtcgaggtaggtagattacgagattagtttggttaatatggtgaaatttcgtttttattaaagatataaaaattagtttggtgtggtggtgggtatttgtaattttaggtattcgggaggttgaagtaggaaaattatttaagttcgggaggcggaagttgtagtgagtagagatcgtgttattgtattttagtttgggtaatagagcgagatttcgttttaaaaaaaaaaaaaaaaaaaaaaataattaaaaaataaataaatagaaaatagagggatgaagttgggagtagtggtttacgtttgtaattttaacgttgggaagtcgaggtaggaggattatttgaggttaggagttggaagattagtttgggtgataaagtaagattttttttttttataattttttttttttgagatagagttttgttttattatttaggttggagtgtagtggtgtaattttggtttattgtaatttttgttttttgagtttaagcgatttttttgttttagtttttttagtagttggtattataggtatttattattatgtttagttaatttttgtatttttagtatagatggggttttgttatgttggttaggttggtttcgaatttttggttttaggtgatttattcgttttggttttttaaagtgttgggattataggcgtgagttattaaattaggttaatttcgtttttaaaaaaaaaaaaaaaaaaggtttttgttggtttggtttttgcggattttattttttggttttgtttggaaaggtgggagattttttttttttgttcggggaatagagtggttagattcgaaagttttttttttttattttttttttttttggggggttaagatatatgttcgttcgttagtataggtttgttttcgttgttaatattaatatattttaattttaaattgttttcggtaagtggggaatggaatagtttagtttttaggtatagtagttgagggtttagggttaatagtttttgggttttgtgtgggtgtagtcggaggggtgggtaggtgttatacgttttgtagatgtttaaggttattttttttgggtatttagggttttagtttggagattttagggttgtagaatgaaagtatattgggaaagcgaggttattttgggtcgaattagttgttgcgggttgagtatttgggtttagtttgtgtggagtgagttttttttggtggttaatttggggatacggggttaggagatttaggggtttagggttggtttaggagagtaagagttcgttacgttgggagtagggaggagggaggggaggagaaaggagtcggaggggatgaggaggaggtaaggagaggagatagaggagttggaagagaagagatagagatgggggaagggaggaggggagaagagagggggaagggaggaaaggggaggcgaggggagaggggttagaagggtgtgtcggaggtggatttttttgaggtgggtgggtgggttaatatttttttgttagttagtgggaatagatcgtgtgtacgtggttatagaagtttggttggtggttacgggttagtgatttttgggtgggtgaggggtaataggagtaatagggttgttcgggtgtttttgagtttttgagattttaacgggtttagggattagtattgaggagttgtttttatttcgtgttttcgagttaattggaaattattttagatagaaggttttttattaggttttcggttttgtttttgttcgagtttagttttagtattcgcgcgttttatttgtcgggttagtcggtttttgtttttcgttttgacgttggtggattcgttgaagattcgtaggtatttttttatggggtcggagttaaagtttatttttttttttagggtcgagtagtttatattcgttttcgcgttggaggtggaggaggaggaggaggaggaggaggatggggcgggggaggggggcggggaggttttgagtcgtttgggcggtttttgcgttttcgggaagtttaggttggagtttgagtcggagtttgagttcgagttgaggttggggagggtagagggttatacgttcggtatttttggttttgcggtttcgtttttattttcgtttttaaagaggtcggcgtggtttagggttcgtttttttagtttgggggcgttttgggaggcgttttcgtttagtgagcgggtttttcgttttattagttttttcgacggggttttggtgttttttttgtcgggtagttggagggggcggggtgggtttttgtcggtcgtcggtcgggagttttcgtttgtggggttcggtcgtcgcgttggtcggttaggtttttttttttttgaggtggttataggagtggtcgaagatggtttttttttggtttttttcggtcgttttgttttgcgtcgggggttgttggtttgcgggttttttttgttcgtacggggtttttttataggtcgttttcggtttttgtttttggttttgttttttttttgggtttcgtttttgtagttgggggtaggtggggtttcggtttttttttttttgggttttttttttttggggtagtttttattttgtgaggattggatttgggttggggaggcgggtttggttgggggcggttggaggttttttacgtcgtattgtacggtcgtttttttggtttttcgtaggtcgtttttttcggtttttaggttttttttggagggtggttgttcggtggttttgattttagggtcggttttggttttgggggtgttggtcgtggtgggttcgttatttgggatcgtggcggttttattttttgagtttgagaattttgtatcgtaattgttaaaggggttatagagttttttgggagtaggtgtgtagggtttattgtcgcgggagtttcggggtcgtttggcggttcgtttatttcgggagttggttttgttgaggtgtcgggtcgagtagttggagagagggttatattttaggtttgtgggtggtttggagttgtttattacgtatttgttattgggaacggggcggttgtgtcgtcggggttggtttatagttttggggacgtattttagggtatcgttattttttttatttttgttttgatttttgtttagggacgttagcgagtatttgttgttcggttcggtaggggcggttagtggggtgggttggtagtcggtattagggtttaataggtcgtggttgtcggggttgtagtcgaaggttagtgggaaggtattttcgttcgggtttatagtggggttggcgttggggtcgcggggcgttagggcgggggtttcggcggagcggtgtttacgggtcgtttttagtagttttcggtagcgtcgttgttttagttttattttattgcgtacggtttcgatggtttggttgattagttttaattttagtatattcgggcgcggttttttttttaggtttagggtgttattttttttttgcgcggggggtttgggtagtttagggttgtaggggtcgtaatttagttttgaagggaatagagagtatagttgtgattagtttgtcggagaggagttcgtagtatgggggcggtttcggttttaaattgtagggaagggaagagatttgttttcgaaatttattacgtattggcgttcgttaaggttttggggtgtttagttgggtataggttatggcgttattttaggttttgtgtcgggtttcgttttgttttgattaatgggcgttggatgggtttgggttgcgtgatatatagttttttgggtattggaggtttttttatacggtttatgaaatgcgtataatgattatggtggggtggatattcgataggttggaatttttcggggtaggcgggtgtggagtttttagtatttagggtgtcgggttgaggtaggattgggttgggtcgataattatagtttgacggtggatataggagagtttttttttagttaatacggttttatttagttagtagtgtgttcgcggtgtggcggaggtgtgttagtagtgtgttagcggtggtgtggtggcggtgtgtttgcggtgatgtggttgagtagggtcgggggatggggatatgtttagttgatgggttattttgtaaaatttataggaagattttttttttttgagatagtttttttgttgtttaagttggagtatagtggtgcgattttggtttatcgtagtttttatttttcgagtttaagtaaattttttgttttagttttttaagtagttgggattataggcgtgcgttattatatttagttaatttttgtatttttagtagagatggggttttattatgttggttagtttcgaatttttgattttaagtgatttattgtatttggtttattttaaattaattttttaattttaaaattttttgtagttgggcgcggtggcgtacgtttgtaattttaatattttgggaggttaaggcgggcggattatttgaggtcgggagtttaagattagttagatcgatatggagaaatttcgtttttattaaaaatataaaattagtcgggcgtggtggcgtatgtttgtaattttagttatttaggaggttgaggtaggagaatcgtttgaatttgggaggtagaggtttcggtgagtcgagattatattattgtattttagtttgcgcgataagagtgaaatttcgttttaataaaaaaaaatttgtagaggtggagttttattatattggttaggttggttttgaattcgtagatttaagtaatttttttattttagtttttaagatagttgggattatagtttaagttgttgtgtttggtttaaagtatacggttgaaatgttttttcggggggtagttgggaatatgagattcgtatgttatttacgtggttttagaatatagtgtagtagatttttataattttaatgttattaacgttagtatagaagttagaattatagaagtttttcgtggggataggtcgaaggagtttaaagaaaatatgagtaagtggagtttagtattttagcgaagtaataaaaattaagtttaaatatttattttagaaatttggaagttgattattagaaattttattgagtacggttaggtatagtggtttacgtcgattattttagtattttgggaggttgaggcgggaggatattgtttgagtttaggagtttaagattagtttggatgatatagattttattttttaaaaaaatatttaaaaataagttgagtatggtgatgtatatttgtgtttttagttatgtgggaggttaaagtgggagaattatttgagtttaggggtttgaggttgtagcgagttaggattgtgtttttgtattttggtttggataataaaataagattttagtttttaaaaaaataaaataaagttttattgaatgtaatttcgtaatatttttaaaggtttttaaaggttaataggtttgattttttggagttggtaggaaatggcgttaaagacgtttgcgttttaatttttggaatttgtagatggtatatttttttagatggtaaatggggttttagatggggtgaaattttttttgttcgttattgagggggttatggataggtcgagattttgtagagtagtttcgtaattattttatgtagttttaatattattatttttagattcggaatttttagaattcgtgttatagatagatcgtatagggtaggtatagatgcgtttggtgtagtttttattgtaaaaatataataataaataacgtaggagatgatttagaagtcgaaacgtaggttatttgtggttaagggggaggcgtgcgttttggagggatttttaagttatattgttatggggaagaagaggggtaaggaatgttgtatatttttatttttgaaaagtagttttataaatttagtgagattagattttaataaaggcgtacgggtttatattaagttcgtagttttatggggtatagtaaatgtaatttggtttttatttatgttgtatttaatattaattgtttaagagggacgtgaatgttgatatatattttcgataggttgataaggagttgtgatattatgtagtaaaaggtaatagttttatgggaatttgttcgtattaagacgttatttggttttgatttgattttgattgaacgtgtagtttgtttgaaggtcgggttttaggtgtgttttttttatttagaaaatttgtttgtttttcggtttatttggagatcgatttttatagcgtgttaagattttcgtgtagagaaatggttggacgtagttaaggggaggtaggtataagattttttattgtgggcgacgtagagaatagtaatagaattggaggttttttttatggtttttatttatatttttttaagttttagtaggtataagaaagaaatggttggtttcggtcggttgtggtggtttatatttgtaattttagtattttgggaggttgaggcgggcggattatttgaggttaggagttcgagattagtttgattaataaggaaaaattttatttttattaaaaatataaaaaaattatttagtcgtggtgatttatgtttgtaattttagttattcgggaggttgaggtaagagaatcgtttgaatttgggaggcggaagttgtagtgagttaagattgagttattgtattttattttgggtaataagagtaaaattttattttaaaaaaaaaaaaaaaaaaaaaagaaagaaaaagaaaaagaaaaaaagaaatggttggttttttaagttgttttttcgagatatatttattagtagaataaaagtttttttaggtaagtttttattttaatttttgggatttgtggttaggttattttatttagttaatagattgtaggtgcgatttgaataaaggattttgagggtgggtgaatattttgtattattcgggaatttagtgtttttatagggttttttaaagagggaggtaggagggtgagagttagagagattggaaaaggttgtgttgtgggtttgaaggggaggaaggcgttttgagtcgagggatgtaggtgtttttagatgttgggaaaggcgggtattgatttttttcggaagttttcgggaggtttagttttgtttatagtttgatttgagtttagcgaggttgattttggattttttagtttagcgttgagagagagtgtgttgttttaaggtttacggggacgaatgtagttttatcgggtgatgaaagtgtagtggaaaatagttgttcgttgtttgtatttgcgaaggcggaaggttttttttgttttcgggaattttgtagggatagcgggaggtcgggattcggaggttgtagaggaggtgggaggaggtttggttacgggtagttgtcgttttttttttgaaattatagtagtgttgtgtttatttttaaaattatatttagggattaggtacggtggtttacgtttgttattttagtacggtggtttacgtttgttattttaggtacggtggtttacgtttgttattttagtattttgggagattaaggcgggtagattattagtttaggagtttaagattattttggttaatatggtgaaattttatttttattaaaaatataaaattagttaggtatgggggcgtgtatttgtaattttagttattgaggaggttgaggtaggagaatcgtttgaatttaggaggtagaggttgtagtgagttaagattatattattatattttagtttggcgatagagtaagattttgttttaaaaaaaaaaaaaaaaaaaaaaattatatttagtgttaggtttagtggtttacgtttgtaattttagtattttggaaggttaagatgagtagattgtttgagtttaagattagtttaggtaatacggcgagatttcgtttttataaaaaaatataaaaaatgagttgggtgtgatggttgtatgtttgtggttttagttatttggaaggttgaggtgggaggattttttgagtttaagaggttaaggttttaatgagttgtgattatattatcgtattttagtttgggtaatagagtaagattttgtttttaaaataaataaaattaagtagtatttagataagaggaaggattcgtgtgtttgttttggattattcggaatttcgcgggattgtgtggagggttacgaggtacgggtaggtaggggaatattatatagaagttataggtttttttttgtttgtgttaggttatagttaaggtatttttaggaaacgttattttatgtgtttagtaggcgtagaggggtttattttggtattattttatagttaaggattttgggagttagcgagggtatttaattaggattagtaattgtggttgttagtttttttgtgcggggagggatagttgttaggttaggaggatgttttcggtagggaaacggtcggttggggttgggtgttagtttttatttagggggagggttgcggaggttagtagtagtttaagggcgttttttcggtttattttattgggggaggtttcggtttttttttgatttagtcggttgtagagtacgttattttgttattcgtttggtgaatagggtaattagtgttagtttttttttagtttcggaagttcggttgtttagtgacgtggaggggttaggttaaggttattgtggcgtgagttgtagagatttatgaaggggaggtgatagagtataattattgaggaggagtaaggttaggttagggagatattggtttttttttttaaggttttagttaacggggatgtagagaggaggaagagttcgtttaacgggaaggtttttttttttaggtaggggtgggtagtagtgagattgggttttaggagggtaggcgggggtggaggggattgaggtatttttaaggggttaaggataagggattttatttaggggtttttatttttttgttttggattttagggttttaagatatagtttgtaagattaatttagtttaggggagttaagagttataggtaatatatatattagttagtagatattcgcgagttttttttaaaggaaggaaatttagatttttggatattgtggattttgaaaggagagattatttttttaaaaggtgtttttggaaggttttggaaggaatagtatttgttttttaggagtggagttaggtttttaagtagagcgtaggataggtgataagggtttaatttgggggacgtgggtttgtttttttaattggaagtttgtgtgagtatttgttttgttgttttgtggagataggtattgtttaggttggagtgtagtggtattatgatggttcgttgaagttttgttttttcggttttagcgattttttcgttttagtttcgtaagtagttgggattatttgcgtgtattattatatttagttaatttttttttttttttggtagagacgggggtttcgttgtaattgtttaggttggttttaaatttttaagtttaagcggttttttcgtttcggttttttaaagtattgtttgttttttaagggttgtgaaatttgttttagtttttagttaatagatgggaaagagtaggggtatttggaggtcggagggtatattttgtagagggggttttagtatttttattttcgggtggaggttgttattatttttataaagattgtattaaaaagaaagtaggtatgttaggcgggttcgagaagattgagattaggatttgtattacggttttttttttttgtggttattgggtttttttattttgtagtttgtgatttattggtgttggaaggtagtattttggtttgggcgttttagttaggtttggaagttttatataggaagttgtttggggttcggttatggttgtttgtagtttagaatagggggtacggcgtgttgagtttttgaaaggttatttgaagttggtatatattattgtttttttggatttttttgttttattatgttttagagggttggatttgggtatttgttaggattggaaaggttttagggtggtatgtgtatgttgttaggtgttttgggagtttatttagggggttatatttaaaggtcgagtttgggttaggcgtggtggtttatatttgtaatgttagtattttgggaggcggaggcgggaggattatcgaggttaggagttcgaaattagtttggttaatatggtgaaattttatttttattaaaaaatataaaaaaaaattagttaggtttggtggtaggcgtttgtaattttagttagtcgggaagttgaggtaggagaattatttaaatttgggaagtggaggttgtagtgagtcgagaacgtattattgtattttaatttgggcgatagagttatatatgtatatatatatatatatatatatatatatatatatatataaatgaatgtcgattttggaagtaggaggggttcgtttaggtttcgttttacggttgggaattattttggataggagtaggtgggtttttttttggatgtggtttaggttagtttgtttttgggaaatatggtgaattggttgataggaaaagtttatttttagaggtttgggagttgtttttttttttttgttttattttaaggttaggattgggaggtattatttagttttagtggttttgagaggttataacgtttggttggttattttttttagtttttttagttagggtttagtttagggtaacgtagtttagttttgtttcggtttaggagagagtttattttttatattatttattttgatcgtattttttgagattagtgttttgtagtttcgggacgggttggatgataaagatgatatttttttttagggttttaggtgtggggtttgggattagtattatttgtttaaggttattttttggtttttaaatttttttttggtttagaaattttttattttgggtatttatttttttttttgtttttattgttttcgttttattatatttaatttatttatatagttgttttgtttttagtaatggggagaatttggtatgagttttaattttatacggagattgaaaggtagtaaaaatgataagattatggagtacgaagattttaatttgaatttttagaacgttttttagtgagattcgtttaaatttttgtttttttttagttagtttattttaaagatgaggatatttagtgttagcgagagtcggtagtttttagttttataaggagttttaggttttttttatttagacggggagatttagtggttttaaagaattcggtaggttggttggatacgatggtttatgtttgtaattttagtattgtaggaggtcgagacgggtggattatttgaggttaggagttcgagattagtttggataataaggtaaaatttcgtttttattaagaaaatataaattagtcgggcgtggcggtaggcgtttatagttttagttatttgggaggttgagataggagaattatttgaattcgggaggcggagattgcggtgagttaagattacgttatcgtattgtagtttgggtaatagagtaagattgttttaaaaaaaaaaaaaaaaaaaaaaaagaattcggtaggtttagtttttgtttcggatatcgttcggtgggttcgtagggtttttaacgtaattaggtattagtaggattggtttttttagtttaggtagtgggtttcgtatgttggtttagaataggttaggtagagattttagatggaaatagatagtttttttcgtttggggtttagttggataaaaaagataagtttgatattgcggtatgagataagtaagattatttttaatttagtttttgggggagttatttgggcggtttgaggttttgaaggtggagatagaagaggatatttttaaaatagttatagcggtagagaaggtacggggttgattttcgcgaagcgtaaggtaggggttggttgtgtttacgggagcgtttattttataatagattttttgggaagaggggtttggaggatagtatttttgaagtttattttttgcggacggtagagtaattataaggtttttataaatggttatacgtttattttgggggtttttgtttttggggttttttttttaatttttatagtgggacgttttttagttttatttttggatatgcgggcgttcggggttttttatgtatagtttattggatagataggaattcgttgtttagaggtaaagggattagtattttgtatttagaggaggttttatagtttttagattatacggggtagaaatagggttatttggagagggtttcgaggaaaagtttagttagtgtcgggggtttggatttttattatttagtagtttttaatattttttttgaaatttaaggtggtttagttttgttttattttttatattagattttatttaggttttagagtttgttgtggaggttgggttgtgtttgtagtagcggtatttggggtttattttattgtttttagggtttttttcgatttttagggttgcgattcgagttttttttttgttttaaggtatcgttttttttatttcgatagcgtagtgtgtagtgttaggatcgtttagtaggtggagttatacggtagggtttaggggagaaaaagaaaaaggtttcggtttgatcggggattattagttttgttttttggggcgttttgggtatttatttattttatggggcggtcgtttttatatgttatgattggacgcgttgttgttttaaggtttatagttcgaggttaggggatagggacggtaattaggatagaggttattgttttttaaaataatgtagaaataggttgggcgtagtagtttacggttttaattttcgcgttttgggaggttgagtttaaggtcgaggtaggtggatgatttgaggtgaggagtttgagattagtttggttaatatggggaaatttcgtttttattaaaattataaaaaattagtcgggtgtgggggtgtttataattttagttatttaggaggttgaggtaggagaattgtttgaattcggaaggtggagtttgtagtgagttgagatggcgttatcgtattttagtttgggtaataagaacgaaattttattttaaaaaaaaaaaaaaaaattagttgggcgtggtggtttatatttgtaattttagtattttggaaagtcgaagcgggcggattatttgaggttgggagttcgagattagtttgagtaatatgtagaaattttgtttttatttaaaaaaatataaaattagttagttgtggtggtatatgtttgtaattttaggtaattttatgtttgggcgtagtagtttacgtttgtaattttagttattcgggaggttgaggtaggagaatcgtttgaattcgggaggcggacgttgcggtgagtcgagatcgtgatattgttttttagtttgggtgatagggcgagatttttttttaaaaaaaaaaaaaaattgaaatagaagggtataaatggtaaaggataagaatcggtagggaggagttagcgggattttttttttttatgtttttttatttttgttaagagtttattttggttgtgagttatttttatggtttatatagagtaagttaagagtttagtttttagtcgggtacggtagtttacgtttgtaattttagtatttgggaggataaggttggtggattttttgagtttaggagttcgagattagtttgggtaatatggtgaaattttgtgtttattaaaaatataaaaattagtagttgggtacggtggtttacgtttataattttagtatttcggaaagttgaggcgggcggattgttttgagtttaggagtttgagattagtttgggtaatacggtgaaattttgtttttattaaaatataaaaaattagttgggcgtggcggcgtgtttttgtaattttagttattcgggaggttg

SEQ ID NO: 170 - DNA, 22069 bp, Artificial Sequence
  chemically treated genomic DNA (Homo sapiens)
tagtttttcgagtagttgggattataggagtacgtcgttacgtttagttaattttttgtattttagtagagatagagttttatcgtgttgtttaggttggttttaaatttttgagtttaaggtagttcgttcgttttagtttttcgaagtgttgggattataggcgtgagttatcgtgtttagttgttgatttttgtatttttagtagatatagggttttattatgttgtttaggttggtttcgaatttttgggtttaagagatttattagttttgtttttttaagtgttggggttataggcgtgagttatcgtgttcggttgagagttggatttttaatttattttgtgtggattatgaaagtggtttatagttaaggtgggtttttggtagggatggagaggtatagggggagaaggtttcgttggtttttttttgtcggtttttgttttttgttatttgtatttttttgttttagtttttttttttttttgaaaaggagtttcgttttgttatttaggttggagagtaatgttacgatttcggtttatcgtaacgttcgtttttcgagtttaaacgatttttttgttttagtttttcgagtagttgggattataggcgtgagttattgcgtttaggtatgggattatttgggattataggtatgtgttattatagttggttaattttgtatttttttaagtagagataggatttttgtatgttgtttaggttggtttcgaatttttaattttaggtgattcgttcgtttcgattttttaaagtgttgggattataggtgtgagttattacgtttagttggtttttttttttttttttgagatggagtttcgtttttgttgtttaggttggagtgcggtggcgttattttagtttattgtagattttatttttcgggtttaagtaatttttttgttttagttttttgagtagttggggttataggtatttttatattcggttaattttttgtagttttagtagggacggggtttttttatgttggttaggttggttttaaattttttattttaaattatttatttgtttcggttttgggtttagttttttagagcgcggggattagagtcgtgagttattgcgtttagtttgtttttatattgttttgaaaggtagtgatttttgttttggttatcgtttttgttttttagtttcgagttgtaagttttgggatagtagcgcgtttagttatggtatgtggggacggtcgttttatgaggtgaataaatgtttaggacgttttagagagtagagttggtggttttcggttaggtcgggattttttttttttttttttttggattttgtcgtgtggttttatttgttgggcggttttggtattgtatattgcgttgtcgaggtggggagggcggtgttttggagtagaggggaggttcggatcgtagttttgggggtcgaggagaattttgggggtagtggggtagattttaggtgtcgttgttgtaggtatagtttagtttttatagtaagttttgagatttgggtggagtttggtgtggggggtggggtagagttgggttattttggattttagagagggtattggaagttgttgggtggtggaggtttaggttttcggtattggttggattttttttcgaagttttttttaggtgattttgtttttgtttcgtgtggtttaggagttgtgggattttttttgggtgtagagtgttggtttttttgtttttgagtagcgggtttttatttgtttagtgggttgtgtatggagggtttcgggcgttcgtatgtttaaggatggggttggaggacgttttattgtgagggttggaggggaggttttaggagtagggatttttagagtggacgtatggttatttgtggggattttatggttattttgtcgttcgtaggaggtggattttaggggtgttgttttttagatttttttttttagagggtttgttatgggatgggcgttttcgtggatataattagtttttgttttgcgtttcgcgagggttagtttcgtgttttttttgtcgttgtggttgttttgggaatgtttttttttgtttttatttttaaagttttaggtcgtttagatggtttttttaggggttaggttgggggtagttttgtttattttatgtcgtagtgttaggtttattttttttgtttagttaagttttaggcgggagggattgtttgtttttatttggggtttttgtttggtttgttttgggttagtatgcggggtttattgtttgggttggaggggttagttttgttgatgtttggttgcgttgagagttttgcgggtttatcgaacggtgttcggagtaggggttgggtttgtcgggtttttttttttttttttttttttttttgagatagttttgttttgttgtttaggttgtagtgcgatggcgtaattttggtttatcgtagttttcgtttttcgggtttaagtgatttttttgttttagttttttaagtagttgggattataggcgtttgtcgttacgttcggttaatttgtgtttttttagtagagacggggttttattttattgtttaggttggtttcgaatttttgattttaggtgatttattcgtttcggttttttatagtgttgggattataggtatgagttatcgtgtttagttagtttgtcgggttttttagagttattgagttttttcgtttgggtgggaggggtttggggttttttgtggggttaggagttgtcggttttcgttggtattgggtgtttttatttttgaaatgggttgattgagagaagataggagtttggacgggttttattagagaacgttttggaagtttaggttgggattttcgtgttttatgattttgttatttttgttgttttttagttttcgtgtggggttggagtttatgttaggttttttttattgttggggataggatagttgtgtgggtggattgagtgtggtggggcgggggtagtgggagtagagaggagagtggatgtttagggtgaggggtttttgggttaagggaaggtttgggggttaggagatggttttgggtagatagtgttggttttaggttttatatttagaattttgggaagaaatattatttttgttatttagttcgtttcggggttgtagggtattggttttaggagatgcggttaggatgggtggtgtagggagtgggtttttttttaggtcgggataaggttgggttgcgttgttttgggttgagttttggttggagaggttggggaagatagttagttaggcgttgtggttttttaggattattggggttgggtggtattttttagttttggttttggggtgaagtagggaggaaggggtagtttttaggtttttggaggtaggttttttttgttagttaatttattatgttttttagaaatagattgatttgggttatatttaggaaggagtttatttgtttttatttaaagtaatttttagtcgtgggacggggtttggacgggttttttttatttttagagtcggtatttatttatgtatgtgtgtgtgtatgtatgtatgtatgtgtgtatgtatgtatagttttgtcgtttaggttggagtgtagtggtgcgttttcggtttattgtaatttttattttttaggtttaggtgatttttttgttttagtttttcgattagttgggattataggcgtttgttattaggtttggttaatttttttttgtattttttagtagaggtggagttttattatgttggttaggttggtttcgaatttttgatttcggtgattttttcgttttcgttttttaaagtgttagtattataagtgtgagttattacgtttggtttaaattcggtttttagatgtgattttttgggtgggtttttagggtatttagtagtatgtatatgttattttggggtttttttagttttgataggtatttagatttaattttttgaggtatggtgggatagggaggtttagggaggtagtggtgtgtattagttttaggtgattttttaggggtttagtacgtcgtattttttgttttgagttgtaggtagttatggtcgagttttaggtaattttttgtgtgaaatttttagatttggttggagcgtttaggttaggatgttgttttttagtattagtgggttataggttgtagggtgggggagtttagtgattatagggaggagaggtcgtggtgtagattttgattttagttttttcggattcgtttagtatgtttgttttttttttggtgtagtttttgtggaggtggtagtagtttttattcgggagtgaaaatgttgaaattttttttgtagagtgtgtttttcggtttttaggtgtttttgtttttttttatttgttggttaaaggttggggtaggttttatagtttttaaaagataagtagtgttttgggaggtcgaggcgagaagatcgtttgagtttagaagtttgagattagtttgggtaattatagcgagattttcgtttttattaaaaaaagaaaagaattagttggatgtggtggtgtacgtaggtggttttagttatttgcgaggttgaggcgggaggatcgttggagtcggggaggtaaagttttagcgagttattatggtattattgtattttagtttgggtaatgtttgtttttataaaataataaaataagtatttatataggtttttagttagaaagataagtttacgttttttagattggatttttattatttgttttgcgttttgtttgggggtttggttttatttttgggaggtaggtgttattttttttaagattttttaaaagtattttttggggaaatggtttttttttttagagtttataatgtttagaggtttgaattttttttttttgggaagggttcgcgggtgtttgttggttggtgtgtgtattgtttgtgatttttggtttttttgggttgggttgattttgtaggttgtgttttagagttttggggtttaggataaggaggtggaagtttttgagtggagttttttatttttagttttttagagatgttttagttttttttattttcgtttgtttttttggggtttagttttattgttgtttatttttgtttggggaggagagttttttcgttaggcgggtttttttttttttttgtattttcgttagttggagttttgggaggggagattagtgtttttttgatttggttttgtttttttttagtaattgtgttttgttattttttttttatgaatttttgtagtttacgttatagtggttttggtttggtttttttacgttattgggtagtcgggttttcggggttgggggagggttggtattagttgttttgtttattaggcgggtggtagggtggcgtgttttgtagtcggttgggttagggaggagtcggagttttttttagtgaagtgggtcgggagggcgtttttgagttgttgttggttttcgtagttttttttttgggtgggggttgatatttagttttagtcggtcgtttttttgtcgggagtatttttttggtttggtagttgttttttttcgtatagaggaattggtagttatagttgttgattttagttgggtgttttcgttgatttttagggtttttggttgtgagatggtgttagaatgggtttttttgcgtttgttgggtatatggggtgacgttttttggaaatgttttggttgtagtttggtataggtaaagaagaatttgtggtttttgtgtgatgtttttttgtttgttcgtatttcgtggttttttatatagtttcgcggagtttcgagtggtttaaaatagatatacggatttttttttttgtttaaatgttatttaattttatttgttttagagataggattttgttttgttgtttaggttggaatgcggtggtgtgattatagtttattgaagttttgattttttaggtttaagagatttttttattttagttttttaagtagttgggattataggtatgtaattattatatttagtttattttttgtatttttttgtagagacggggtttcgtcgtgttgtttaggttggttttgaatttaagtagtttgtttattttggttttttaaagtgttgggattataggcgtgagttattgagtttggtattaagtgtaatttttttttttttttttttttttgagatagagttttgttttgtcgttaggttggagtgtagtggtgtgattttggtttattgtaatttttgttttttgggtttaagcgatttttttgttttagtttttttagtagttgggattataggtgtacgtttttatgtttggttaattttgtatttttagtagagatggggttttattatgttggttaggatggttttgaatttttgagttggtgatttgttcgttttggttttttaaagtgttgggatgataggcgtgagttatcgtgtttgggatgataggcgtgagttatcgtgttgggatgataggcgtgagttatcgtgtttggtttttaaatgtaattttaaagatgggtataatattgttgtgattttaagggaaaggcggtagttgttcgtgattaggtttttttttattttttttgtagttttcgggtttcggtttttcgttgtttttgtagggttttcgggaataggaggggtttttcgttttcgtaggtataggtagcgggtagttgttttttattgtatttttattattcggtgaggttgtattcgttttcgtgggttttaaagtagtatatttttttttagcgttgggttgggaagtttaaagttagtttcgttgggtttaagttaagttgtgggtaggattgggtttttcgaaggttttcggggagagttagtgttcgttttttttagtatttggaggtatttgtatttttcggtttagggcgttttttttttttttaaatttatagtatagttttttttagtttttttgatttttatttttttgtttttttttttaaaggattttgtgaggatattgggttttcggataatgtaagatgtttatttatttttagggttttttgtttaagtcgtatttgtagtttattggttgagtgaggtggtttggttataggttttagggattaggatggggatttatttggggaggtttttgttttgttggtgggtgtgtttcgggggagtagtttgggaaattagttattttttttttttttttttttttttttttttttttttttttttttttttttgagatggagttttgtttttgttgtttaggatagagtgtaatggtttaattttggtttattgtaattttcgttttttaggtttaagcgatttttttgttttagtttttcgagtagttgggattataggtatgggttattacggttgggtaatttttttgtatttttagtagagatggggtttttttttgttggttaggttggtttcgaatttttgattttaggtgattcgttcgttttagttttttaaagtgttgggattataggtgtgagttattataatcggtcgaaattagttattttttttttatgtttgttggggtttgagggggtgtgggtgggggttataggggaagtttttagttttgttgttgttttttgcgtcgtttatagtgggaggttttgtgtttgtttttttttggttgcgtttagttatttttttgtacggaagttttagtacgttgtgggggtcgatttttaggtgggtcgaagggtaggtaggttttttgagtggaagaaatatatttgaggttcgatttttagataagttgtacgtttagttagaattaagttagagttaagtggcgttttggtgcgggtaggtttttatggggttgttgttttttgttatatggtgttatagttttttattagtttgtcggggatgtgtgttagtatttacgttttttttgggtagttggtgttgggtgtagtataaatgaaggttagattgtatttgttgtattttatgggattgcgggtttggtgtgggttcgtgcgtttttgttggaatttgattttattgggtttgtggagttgttttttaaaggtgagagtgtgtaatattttttgtttttttttttttttatagtagtgtgatttggaggtttttttagggcgtacgttttttttttaattataggtgatttgcgtttcggtttttaggttattttttgcgttatttattgttgtgtttttgtagtgaaggttgtattagacgtatttgtatttgttttgtgcggtttgtttgtggtacgggttttgaggatttcgagtttgaaggtggtggtgttgaagttgtatgggatggttgcgaaattgttttgtaagatttcggtttgtttatggtttttttagtgacgggtaagggagattttattttatttagagttttatttgttatttaaggggatatattatttataggttttaggaattaggacgtagacgtttttggcgttattttttgttaattttagaggattagatttgttgatttttagagatttttagagatgttacggaattatatttagtggaattttattttatttttttaagagttggggttttgttttgttgtttaggttagagtgtagaggtataattttggttcgttgtagttttaagtttttgggtttaagtgatttttttattttagttttttatatagttaggagtataggtgtgtattattatgtttagtttatttttaagtatttttttaagagatgggatttgtgttatttaggttggttttaaatttttgagtttaagtagtattttttcgttttagttttttaaagtgttgagatgatcggcgtgagttattgtgtttggtcgtgtttagtagaatttttaatggttaatttttaagtttttggagtaaatatttgaatttggtttttattgtttcgttggaatattgggttttatttgtttatgttttttttagattttttcggtttgtttttacgggaggtttttgtggttttgatttttgtgttgacgttggtggtattgaggttgtgagggtttgttatattatgttttggaattacgtaaataatatgcgagttttatgtttttagttgtttttcgggaagatattttagtcgtgtgttttaagttaggtatagtagtttgggttatagttttagttattttggaggttgaggtgggaggattgtttgagtttacgagtttaaagttagtttggttaatatggtgagattttatttttataaatttttttttgttgagacggggttttatttttgtcgcgtaggttggagtgtaatggtgtgatttcggtttatcgaaatttttgttttttaggtttaagcgatttttttgttttagttttttgagtagttgggattataggtatgcgttattacgttcggttaattttgtatttttagtagagacggggtttttttatgtcggtttggttggttttgaattttcgattttaggtgattcgttcgttttggttttttaaaatgttgggattataggcgtgcgttatcgcgtttagttataaaaagttttgaaattaaaaaattaatttaaagtaggttaggtgtagtggattatttgaggttaggagttcgagattggttaatatggtgaaattttatttttattaaaaatataaaaattagttgggtgtgatggcgtacgtttgtaattttagttatttggggggttgaggtaggaggtttgtttgaattcgggagatagaggttgcggtgagttaagatcgtattattatattttagtttgggtagtagagagattgttttaaaaaaaaaaaatttttttgtggattttgtagggtggtttattaattgggtatgtttttatttttcggttttgtttagttatattatcgtaggtatatcgttattatattatcgttggtatattgttggtatattttcgttatatcgcgggtatattgttggttgggtggggtcgtgttggttgaggaagggtttttttgtgtttatcgttaggttgtggttgtcggtttagtttagttttgttttagttcggtattttgaatgttgggagttttatattcgtttgtttcggggagttttagtttgtcgagtgtttattttattatggttattgtgcgtattttatgagtcgtgtgagggagtttttagtatttagggagttgtgtgttacgtagtttaggtttatttagcgtttattggttagggtaaggcggggttcggtatagggtttgagatggcgttatggtttgtatttagttgggtattttagagttttggcgggcgttagtgcgtggtgggtttcggaggtaggtttttttttttttttgtagtttgagatcggggtcgtttttatgttgcgggttttttttcggtaggttggttatagttgtgttttttgttttttttagggttgggttacgatttttataattttgagttgtttaagtttttcgcgtagagggagaatggtattttgggtttgggggaggagtcgcgttcggatgtgttggagttggagttggttaattaggttatcgaggtcgtgcgtagtgaggtggagttggagtagcggcgttatcgggagttgttggagacgattcgtgagtatcgtttcgtcgaggttttcgttttggcgtttcgcggttttaacgttagttttattgtgggttcggacgaggatgtttttttattggttttcgattatagtttcggtagttacggtttattaagttttgatgtcggttattagtttattttattggtcgtttttgtcgagtcgggtagtaagtattcgttggcgtttttggataggggttagggtagaggtggagggggtggcggtgttttggaatacgtttttaaggttgtgagttagtttcggcggtatagtcgtttcgtttttagtggtaagtacgtggtggataattttaggttatttatagatttggagtatgattttttttttaattattcggttcggtattttagtagggttagttttcgggatgagcgggtcgttaagcggtttcggggttttcgcggtagtgagttttatatatttgtttttaagaagttttgtgatttttttggtagttgcgatgtaaggtttttagatttagaagatgaggtcgttacggttttaggtaacgagtttattacggttagtatttttaaagttagggtcgattttgagattaaggttatcgggtagttattttttaaagagggtttggaggtcgaggggggcggtttgcgggagattaaggagacggtcgtgtagtgcgacgtgggggatttttagtcgtttttagttaagttcgtttttttagtttaggtttagtttttataggatgggggttgttttaaggagggaaaatttaagaagaaaaaaatcggggttttatttgtttttagttgtaaagacggggtttaggggaaggataagattaaggataagggtcgagggcggtttgtggagaagtttcgtgcggataagaagggttcgtaggttagtagttttcggcgtaaggtagagcggtcggaagggattaagaagaagttattttcggttatttttgtggttattttagggaaagggaggtttgatcggttagcgcggcggtcgagttttataagcggggattttcgatcggcggtcggtagaggtttatttcgttttttttagttgttcgataggaagagtattaaggtttcgtcggggaagttagtggagcggaaagttcgtttattagacgagggcgttttttaggacgtttttaagttgaagaagcgggttttgagttacgtcgatttttttggggacgagagtgaggacgaggtcgtagggttaggggtgtcgagcgtgtggttttttgttttttttagttttagttcggatttagatttcgatttagattttagtttgggtttttcggaggcgtaggggtcgtttaagcggtttaaggttttttcgtttttttttttcgttttatttttttttttttttttttttttttttatttttagcgcgggggcggatgtggattattcggttttggagaaggaggtggattttgatttcgattttatggaggagtgtttgcggatttttaacgagtttattagcgttaagacggaggatagaggtcggttggttcggtaggtgaggcgcgcgggtgttggggttgggttcgggtagaggtagagtcgagggtttggtgagagattttttatttggagtggtttttagttggttcggaggtacggggtggaggtagttttttagtgttggtttttgagttcgttgaaattttaggagtttaggagtattcgggtagttttgttgtttttgttgttttttatttatttagaggttattggttcgtggttattagttaggtttttgtggttacgtgtatacggtttgtttttattgattggtagggggatattggtttatttatttattttaggggaatttattttcggtatatttttttagttttttttttttcgtttttttttttttttttttttttttttttttttttttttttttttttttatttttgtttttttttttttagtttttttgttttttttttttgttttttttttatttttttcggttttttttttttttttttttttttttttatttttagcgtggcgagtttttgtttttttgggttagttttggatttttgggttttttggtttcgtgtttttaaattggttattagggggagtttattttatatagattgagtttaagtgtttagttcgtagtagttggttcggtttaaggtggtttcgtttttttagtgtgtttttattttgtagttttggggtttttaagttggggttttgggtgtttaggagaggtagttttgggtatttgtagaacgtgtgatatttgtttattttttcgattgtatttatataaagtttagggattgttggttttgagtttttagttgttgtgtttgggggttggattgttttattttttatttgtcgggggtagtttgaggttggggtgtgttggtgttggtagcgagggtagatttgtgttgacggacggatatgtgttttagttttttaaggaagagaagagtgaggagaaggggttttcgggtttgattattttgtttttcgggtagaagaggaggattttttatttttttaagtaaggttaggaggtaaggttcgtagaggttaggttagtaggagttttttttttttttttttttaaagacgaggttggtttggtttggtggtttacgtttgtaattttagtattttgggaggttaaggcgggtggattatttgaggttaggagttcgagattagtttggttagtatggtaaaattttatttgtattaaaaatataaaaattagttgggtatggtgatgggtgtttgtaatattagttattagagaggttgaggtaggagaatcgtttgaatttaggaggtagaggttatagtgagttaagattgtattattgtattttagtttgggtgatagagtaagattttgttttaaaaaaaaaaaattataaaaaaagggggttttgttttgttatttaggttggttttttaatttttgattttaagtgatttttttgtttcggttttttagcgttgggattataggcgtgagttattgtttttagttttatttttttgttttttgtttgtttgttttttggttgtttttttttttttttttttttttgagacggagtttcgttttgttatttaggttggagtgtagtggtacgatttttgtttattgtaattttcgtttttcgggtttaagtgatttttttgttttagtttttcgagtatttgggattataggtgtttattattatattaggttaatttttgtatttttagtagagacggggttttattatgttggttagattggtttcgtgatttgtttatttcggttttttaaaatgttgggattataagtatgaggtattgcgtttagaggtgggtagattacgaggttaggagttcgagattagtttggttaatatggtgaaatttcgtttttattaaagatataaaatattagttgggcgcggtggtacgtatttgtaattttagttattcgggaggttgaggtaggagaattgtttgaattcgggaggtggaggatttaatgagttaagatcgtgttattgcgttttagtttgggcgataaggtaagattttgttttaaaaagataaatatataaaatgagttatttatttataaatttttgatttttttgggatattgtttttgtaaatttgtgacgttttttgtaaagtattagtgatttttttattcgtttttttatttaagttttattataaatttgatgtttaatatttgttttaattttagtagaatttttgttgttttgattggggttttgttttaattgatgttttatttttttttagtgttttaaatttcgtttggtttagatatgttatgataagttagtattagtttattttggggtaaaaaaatttgaaagttatgtaagtttcgttataacgtacgttttttatgagttttttgaagatattttatttttgacgttgttcgagttttagagggagttggttttgtttttttttgttagattgttacggtgttggggcgagggatagagtaggttagtagttttagggtgattttttttagagtgcggtagacggtttgttgcgtcgtgtgcggtttgggtttgggtcggttgtttagttttgagttttagtgttttttgtagttcggagatagtagcgtttgttaggtttttgtgtagacgtggcgaggtagtgtaggataagtagagagtttggtttcggggttagtagttaggagagttttagttgttttagttttagagtttttttagaggaggggttttgaggaagattaggcgtagtgggattggattggagtgttagtgtaatcggggtagtttcgtttattcgtgttttattagggttgaggatatagtttgggtatcgggagatattgggagtgggggagtttggagttatatggtattgaggattattgttttttgttgtttttttttagtgtgtttagtagtttagaaggtagttagggaggtggtgttttcggttttcgagttttagttatttttttttaagtttgttcggggtcgtttgttttaggtgttttcgttgtgttgttaggttttagtatttgtggtgacgtaggtggagttttcgaggaggggtttcgcggtgttttcggttcggttttcgacggcgtaggaggtgtgttatttgcgggtttagtaggcgtagagggtatcggcgagtttgttgtaggttttcgttaggttggtagagaagtcgtttttcgtttatattttcgtttttggcgagaagaggaggatcgtttatatttttaattttcgtttggttgtaggtgagttttggtttagggggtttgtgtcggggggtcgtgggtatgtgggtaggagaggtggtattttgaggtttttgagtttatttgaattatatggtgtttgtttatgggatgattttgggttttttttttggggtttttagtttgtttgtttgtgaaatggggattgttgaggggtgtaggaggtttggtttagtattttttttttttgatttagtttcggggttattaggagtttaatagtttgttggggattgggttgaattagggtttgagtttgtggttttagggaatggggagttatgtcggggtatttggtattgggtggggagtaggtttttgtaggtgtggtttttttttggcgtgtgagtggggggcgtggtttttgatggaaatgagtgttgtttttttaggagtggggttgtattttttttatttcgaggggtattttttttttagtagggttttgtagaaagtcgggttaggttttagtggtgggtggataggattttttacggggggttgttttgttttttgcgtttttatattagtggtgtttgtagagcgagaaagtatttttggaggtaggttatagatgagggttttttagaaagtttttaaaaaatgtaggttttggtttggaggttgggaaaggtttgtgtgtttggtaagttttttgggagggtatggttgttgttcgaggattattttgagtagtttgttggtttggagtttttgtttttttggcgttggttggagagttttagggttagtttcggcgatttttttgtagattttatggattttacggttttttttagggagagttttttaggttattttgattttttttttttagagtttttttacggttgagattttagttttagggaggggaaattattgagttgggtttattttaggattttatacgtttttcgtttgtgttttcgcgttcgggttgttttgttgttgatttgtggtgggtgttgagttgtcgtagtgtttttggggttcgtcgtttgaagggagtttggcgttttaagtgttggtagtgtcgtagggcgggtttatttggtttggaggatttttgtggttgtttgggttcgtttttagcgtgtagtcgagggagtttggaggttttttgttcgtttttgaagagtaaattttttattgtaagaggcgcgtgttagtttggcgggtagtttgtttttttgttgggcggttcgcggtagtatgagtagatttattttgttttttttgtattttttagggttagatggtatttcgagggatgttgttttgagattagggttagatgtttttgtttatagtttttttttttgggtcggtgtcgagtttttagtttagaagtttttttgttatatagacgtatatgtttaggttgtagttgttcgcgtggttagtttttcgaagtagtttttgtaggtttggttttttttttttggtttgtgattttattaaagggtaaggtagaatatagaggtcgtagggtagggtaaagttaatgagtaggtgggggtattcgagatttttcggttttttgttcgggagttagggttttttttttagatatcgacgttttgggtttggggttagaatacgtggtagaggtttggattattttatcggtgacgtgtttttagcggttttcgtagtttgatttgtgttttttgtttcgatggatttgtttgaaggtagttagagtttgatgttattgcgtagttttagttttttattttggttcggttttttgtacgcggagatgtacgtgttgttggcgttgagcggtcgcggttgtttggtgtttcgttacgtggtgatgggtagttattcgttttgtgtttatattttttgtgtttcgttagtttttataggtgttaagaggatttttgcggttagcggtagttagttttttaacggttttgagttaggtggttagtagttgaaaatacgtatattgtcggggatggcgtttaagattattattattattatttttaagcgaatcgtttatagtttatttttataggtagttttttttatttcggttaggattattatttttaagattacgttttgaggttcggttatatgggatttgcggagggttagtttcgtttttgttttgcgggttttcgtgttttatatcgtagtatagtttttattttttttttttatgttttggtgttttttttttttttttgagatggagtttcgttttgtcgtttaggttggagtgtagtggtacgattttggtttattgtaagttttgttttttgggtttacgttattttttggttttagttttttgagtagttgggattataggcgttcgttattacgtttggttgtttttgtatttttagtagaaacggggttttattatgttagttaggatggtttcgattttttgatttcgtgatttattcgtttcggttttttaaagtgttgggattataggcgtgagttattatgttcgatcgttttggcggtgtttttttgttttgttttgttttgtttttttggttggttggtgttttttttttttgtttagagatagggtttttgttgtttaggttagagtgtaggggcgtaattatggtttattgtaatttcgattttttgggtttaagtgatttttttattttagttttttgagtagttgggattataagtcggtgttattatattttagttaataattttgttttttattttgtagagatagggttttgttacgttgtttaggttgattttgaatttttgtttttaagtgatttttttgttttagttttttaaagtgttgggattataggcgtgagttattacgtttggttttgttttgtttttaattaatagattttatgttttttgagtaattttaggtttttaggaaaattgagtagaaagtatagtaagtttttttgtgtttttatggttttagttttttatgattttagtttcgttgtttttagttttttttgttgtttttgttttgttttggcgtgtttgtttttattgtagttaggttgatttgttttagcgtattttatttttgtttttagttatgggtacggttttatcgcgtttgcgtttttcgttggaggttttgtggaggtttttatttatggtagtttttgttttttttttagagtttaaagaaatttattatttttaaagagtttgggggtaaagtttttatcgttattcgttagcgttattttaatttgtttatcgaggagtgttttaagttttgtatttttaattaggaggttatagagaaggtgaggttttggagtttttatttggtcggtcgggtggggattaggggtttagggtggtttttagatatttttcggttttttagtcgtagttgtgattcggagttgtttgggagagatgtaagttttcgattttatggcgattttatcgttggggtttttcggtattaggtaggtatggttttagttgggtatcgtttgttttttaggtattgaacgaggagaaggtggtttatgatcgtagttttagtaagaatatttatttgaatgtggtcgtgaatatttttaagaagtttaggggtttggtttttagcgttgtgttcggttttagtagtgagttttggcgggtgggcgggggaggtttagggttgtttttggggtggtagttgggttgggattttcgttgggatttttatagttttgagtttagttatagttttagataaaaggaaagcgcggtgttgtgggggggttgtttgttgtttggtttttaggtttttgtgtaggacggatttggttttggtgttttcgttgttagtcgttttttttcgttgagtggggtttttaagtcgagtcgaggggtcgtttgttaatggagttgcggtagtttttttaaagtaggaggtttagggttgggcgagttttatgtattaagttttggggaggaagaaagcggagatttgggcgttttattgtagtttttttaggttgtattaagttattatcggtttttgttttcgttttcgtttgtattagtattcggaggggttttgggttggcgtcgtaggttgggtggtttatgaaggtttaaagttttcgaaagttattagatttttcgtgttgtttttttcgttttttttttttcgtttgaggggaggggacgaagattttgggtgtggggttttcgtgtagttttggggtttgtagagttggcggttgttttgcgtttttggtttatcgtatgtttgttttttttgttcgggttaggttggaattcggggttagtggggtgttgttttagaaagggggagttgaggtagaggtttgaggagggtagggtgggtgggagagtaggcggggtaggggtttgagttagttattttatatttttttttttttttttttttttttttagaaattagtggtcgtagggttgtgttttacgaggtggtgttggggggtaggttggtcgttaagattagtttttcgtttagtcgtttaagtagttttcgggtggaggatttgaaaggtaaggttttgtttttgttttgttatacggtgtttcgtgggtttttgtcggtttagtttttgttgtgttatacggtgtttcgtgggtttttgtcggtttagtcgtttttttcggtggtgtttatcgtttcgtgggttattttaggtaggggttgattattgtgtttgtttataggggttgttttgtatagtcgttttagggagtatttgtttatttaggattagtttaaggagaacggttattttttttcgtatttagagcggttcgggggcgtaattatttttatagttgaggagaagaggtttaaggattgtgagtcgttggtttgcgacggtttaggtgggtaggtgcgggatgtgggtaaggtcgggtatgcgggttttagcgtgagttttagtttttatttgggtttttatttatagttttttgtaggatttgttgtcgttgtggtatcgagtatttcgtgttttttttaggtcgttgtattcgggacgaggagtgttattattattggggacggttgcgtcggaatcggggtaaggttttattcgggttttttttttttttatttatggttttcggaatttgggtttttttttgaggtttttagaattggggtaaggttttatttaggttttttattttatttagggtttttgggttgtatcgtttttggtagagtcggggttagtttttggttttattttttttttatttgttttttatgtaaaagtaagataagagtttttttatgataaggtttaaatgttattatttgaaaggttttgtgtttttgtttttttgtgtttttggtttatggaaatgtggaggttgttggttttaggagcggaggggtttgttttatttttggtttggtggttttatttaattttttaggtaattacgtagttacgtttagggtatatggttagttttgtatagttttgtggcggtttttaaagttatcgttttagggatatttggagggtgttgttcggggtagcgttgttaagaggtttttgtagagggtattggtttttttggatttaggtttgggcgttttggttgttatacgattgtcggggtttggtttgtttttagttttattaagaggttgaggttttttgtttttagtttttattttttagtagggttcggtagatgtaggtggttagtgtttcgggggttgtggagtgggtttggtcgggttttgattgtgtgtttgtgttttttgtagtggtcggaggttgggagatttagtatatgtgttgttcggttgtcgtcggttttgtcggttgttaagtcgtaaaggtgagttttggcgttttagttttttttgtttgtttttaatagatttttgtttttttatcgttggtgtggggtttcgggatatagtatagttttgggtttagggtttgggttttcgggtagttttttttgtgttatttagagaacgtagtattcgtaggttttaggttttgtttttggttattttttattttgggaagtcgttttttttgtgtttttttggtaagtttttttttttatttgtttattagggttttaattagtgaatgggcgtgatggatggataggatggtttcgaagggtttagagatgtgttgttgttgttattttcgtttttattgtatttcgaagttgtttttatttgttttttttatttttagtaatacgtgtaggatggtcggaaggagcgttttgagggtttcgtgaagatttttgagaaagagtttttaggagatatttattcggggatttacgttttggattgcgagatggtgaggttgttttttgtttagcgtcgggtttaggattggggaggatttggtttggtgcggtcgttttatttggttttatttgggtttggtttatcggttagcgtttagggtttttttcgtagtatcggtg

SEQ ID NO: 171 - DNA, 9724 bp, Artificial Sequence
  chemically treated genomic DNA (Homo sapiens)
tttttcggcgtttaaggtagggttagttttatttttaggagacggggggtttttttattatcggggtttttgtgtttttaggcgtatggaggagggtagttttacggtgttggagtttttttaatatggtttgtttaggtagtatttcggtatggttttttggggttggggtttcgggttaggtttgggttttacggtatttgaggaaggtgttttttaggaaggcggttagttttattcggtcgttttgcggaaggagggaggtatgggggacggaggggcgcggtttgtttcgtgcgtttttttcgttaggtcgcgtcgtatcgtttagcgtatttcgtggaggaagttatagtgtacgagtttcgaggcgaggttttgggcgttgttcgttgaggtaatggcgtaaggcgaggtatgaggtcgttgtttattcgtcgtttggggttatcgttcgtcgtttaagttttttgtttagtttatttgggagtaggtcgtaggttagttgtcggtgtagtcggttttttagtattagaagtagagtgagttggggaggcggcggggcgtggtcggttgggggtttagggtttcgttacgttttcgttttttttacggtagcgtcgtttttttaggtttcgtttatatgttagcgcgttttgttttcgtttttttttaggttgtattgtatttggatgatttgtagcgggggaaggttgggatttataaatttagtagtaagattatatgtcgcggttttaaaggggtcgggaagggatagtaaagattggaaaggggggaatttttaagaggagtttattttattgttagtggtttggtaagttaaggaaagtttcgagaagagtcgatattaggggttgggtattgaaggttgaataggagtttttatcgcggagagaataatttgaataaagagggaattgtgggcgtggggaaagggaggttgggcgggataggatcgcgtcgaagtgtacggtgtttgcgggattaggttttttagagtttgggcgttagttgaggatttttatgatttttgttggtagttaggagtaggtagtttgtttgttaggatatgaattttggttgtattgtatcgagagaggtttttggttaggagggggtgttgtaggaaaagtttggggagatattaggatatagatgttcgggaattagtattaggtgggggatgggaggggtggggggggggtgggaggggtgcgggggtgggggaagattgttggtagggtggaagagttcgggtgagttttggaggaaggatgtttggagtaggtttagggtaggtagtaggatgtaggggaaggatttgaggggatagggagtttttcggaaaaggagagtgtttagtttgttttataatttttatgatttttataagggggttagtttggatttggtttttggtagttaggaggagagttgggttgtggggatgtaggttttaagagaaggaggggtattttttatttggttgttagaaggtttgagggatggtattgagtagtaggagaggggatttatttttttggttttagagttaaagggttttggcgtcggggttttggttttttggatttttttcgggggtggggttagtatacggggtagttttaggggtcgagtggttgtaaagtttattagtgggtagattttatttttggggatataatagggtggttgggggtttaggtttgatagttgtttggtttttaattttatattagtttttatttgatattttttaggaatttgtttagttttatgaaggagattttcgagtatttggtatggaagtgggaggtatatgaggggttggtcggggcgaggggaggggaggtgcggggaggggatgtgtggggaggggaggtttttgggtgttgattgtttatcgttattgtagcgggggtttgcggggtcggggaagtttcgttaagatcgcgtgtaggtttatggttttggtttttttttttattatatttttaggtatgaggtttgcggttataagagtattaaggcggtgtgtttaggtcgtgggttttgtagggttttttttacgttttaatttttatttttttagttatttttcgggtcggtttgttgtttatattggtgttggatgaagtagtgggttgttaggagttttagcgagtgtatttcgaagagtacgcggtggaagaggaggttgtgggtagagggtcggcgggtagggtttcgggttaggtagtaaaggatgaatttttggggtatagggaggagaggttggtggtgtgtaagggttttttgttttggtttcgtagttcgaggagaggtggtttttgagttttttatgtttttttttagggatatataggatatgtagggatgtttatagggaggagttttagtagtagtagttaggttaggatttggttttttgagtttgaggatagttgggttttgggattggagtattatgttttgtttttttcgatttttaaaaaatcgtggggagaagttatgattttaaagttatatttgtaagttttttatttatggttttttgatcggtttagttcgggtttaatattggagacgattttgatgggtttttattttgtttatattcgtgtttagttcggttttagttcgttattagtttcgattaggtatttttattttttgaggttatggagttaagtttagatttcgagtagagggggttgtggatgtagtttttattttatatttttttttgtttgtttggtatttattatgtttttttataagttggagttttattattttttggaagtttaaagttaaggatttggagtgaagtagatttaggtgtagatgttggttttattatttattttaaagttttgggtaaaggatttattttttttgaattttggtttttttataaaacgggtatggtgatggtagttatagagggagggttttttttgtttttttgtttttagaatgtgttgattttttagggtttttaggtttggaattagtatgtgtttttattgaggttttttttgggaggggtgtagttagttggtatattttttaattgtataaattgtgatgtttttttaggtttgtttggagtattttgttagttttagttgagtacggtgagttagttggggaggggtagggtaagttgtttattcgtatgttggggttatttagcgagtgtttggcgcgagtaatggttttttttgtgattcgggtgtttttattggtttggatttttagtatagttatttggggtatagagttaggttaggtatggggaagggattatataggtgagttaggtagggtatagttaggaggagggtagagtataaggtggagggcgggggtagtatttttagcgtatatattttaaaggagaagatgtttatagcggttttatcggttatttttgaatagaagagagtataggatacgtaggagagaagcgtagggtaggtacggggtattcggatttagtattatttatttttatattttggggggaagaagtgtaggtttcgaagtttttttcgtttagcgcggatggggtttcggagattatttggaagtgttgtgggagggcgtagagttgagcgggcggggatttttttaggatttcgtttttttaaagttcgtatttattattggagaagattcggtgttatattgttaaggggcgggagaaagagtggagttagttgttggggtattagaatttttttgtttttggttttaggtatttttttttgtttcgtttttttatttagttttgtttcgttagtatcggagtcgattttgatgaggtcgttgtgttgaatgaagatggtgtcgttggttaggttttcgtggatgattggggggttgtaggcgtgtaggaagttgtagacgttggggaggggagagtaggaggagtcggttaggaggttttggagagatgggggttcggtggcgtcgcgtttaggttagtttaggtttttatttgagcgtagataggatttgcgtgtattagcgtttttaggtttggcggcggacgtacgatttcgtcggtcgggtgggcgtaggagaggcggttgggtttgcggagttcgtttcgtattttcgtttagtttttgttcgaggtcgtcgggtatttttttattattttagttttcgaggttgttttaatttcgttttgttttcgtggttgttttagttcgttttttatattcgggcgtttatggttttgtggttttttttggtttttttgaggaattgtttgaggttgtttgatgatacgtattttgtgatgaagatgatttgtacggtgcgagtttaggatttttattagttgcgggttcgtttttatgttcgttttatttagttgtggtttttgtttgttcggggttttgttcgtgtttattttcgcgtaggttttagaggtatttagttagtatttgtgtaattttacgatgttcgggtggtttattagtattagttgttcgaatacggtttggatttttttttggggagggagggtggtcgttgggtggttagtaggtggttatttaagtaggatgaggagggggtagcggttttatttcgtgcgtcgcgaaggtttttttgttttcgaagtggagttcgttttatattatttttattttttttttcgtgtttatggttaggaaggtgttttgaagttttggtatgtttttttggtttatttgggggtgaataaagggttatgtgtgttttggtgtgtgttagggttgtgggtgaggatttggtttttgtttatatttttttagtgggtttaagcgtgggttgtaggttttgagttattttgcgggaaggtggggtttggagggtagttgtttttaggagttaagggtttttatttaagggttgggttaaggggatttggagtaggttttagggggtcgagggggatttttaggaagttagcggttgagtttagaggtatggggaggtggttttgggaggagattggtttttagggagttttagggcgagcgttaggttaaaggggtttaggggtggttgattcgcgggtcgcgaggggtcgcggagaggtttttagtcgtcgcgtttttttagcgtttttacgtttcgcgtagtttttaggtttttttcgttttgggagggcggtgttatttcgtgttttaattttcgcgtttatttgttttcgtcgtttttgttagcgattatacgggtttttttttaggatgtcgttttcgttttcgttttcgttttttcgttttcgttttcgttttcgggttcgtttcggcgtcggtttcggggtcgttatggttcggttagtttaggttatcgttttttgcgcgattcgtcgtcggcgtagtttttttcggttcgttttggtttcgcgtttagtagtttagtttagagtcgtcgcggtagtttagagttttagtttcggttttgggaattgggaggcgcgggcgcgcggcggacgggcggggttcgggggcggagtcggcgcgtatttttcgagtcgtttgtgtttgtcggagttagagtagagttttttcgagagttgtcgagttcgggtcgcgtttaggtttcgttttttcggaggtttcgtttcgcgaagtttcgttttagtttttgtttttttttcgttttttaggtttgtttcgcgaagtttttttttaggttttgtttttttttcgttttttaagtttttttcgcgaagtttcgttttaggattcgttttattttcgcgaattttcgtttcgttttagttttcgttttcgttcgtttttagggtttttcgcgaagttttattttaggtttcgttttattttttcgaagtttcgtttttatgaggtttcgtttcgcgtagaggaatcgtttttaaattttcgttttttcggaggtttcgttttgcggatatttggagttcggagcgtttatttttttcgcggttgtttttttaggatttgggggaagattcggggtatttgggggtttttaagtttacggtattttttagttgtagaagatttcgcgggttcgaaagcgggattcgtttttttggttacgtatttatttttcggtcgatttttaagggataggtcgaaggggtatcgagggcgggggaaaggtttattagtaggttgatttaggttgattttgatcggtgattacgaatttttttttggttcgtttattagtgttttttttcgtttataagtttatttttttattttttaggatggcgatttttttttttttttttaaacgcgtatttttttttcgcggttggtttttatgggatagtggaattatgaggggggagtttattcggtttatacgattttttttttcggaggtcgttttaagtatattttttagttacgtcgattatcggggttgttttcgatttttatttaaaattttttttagtttatagtttttacggtttttttgtggtttttttttttttttacggcgggtttttattttttattttttttttttggagtttaaattggaatttcgtttttttttttcgcgtagttttatgtattggttttttgggacgtttttttttttttttggtagaggtgtatttggttttgttgcgttttttgtggttttttttttttgattagttttggttattaggtattttgtgtgtggtttttattaatgttaggtgattttgttgaggttttttgtagtaaaggtttggggtgtttaaattttttattttgaaattggttttgattagtttttgggagatattttttaagtttttggaatgttttgtttgatttgaatgtttgtgtttatttcggttatattagattttatgttaagtttgtttaattcgtagtttagagggtgtattcggttaaggatagttttgaatatggtttaatataaatttataaatttttttattgagattttttttaaagtttattagttgttgttagtgttaagtgtattttatttaagggtattgtttaggataatttttttaatgtgtgttaggaaagtttatagattggatatttttggtttgtgttaataatatggtttacggggggattttgggttatgtggtattagtttgatttttgtaggggttggaggttaaagttagttatttgggaggttagttatgtttgtgtgattaatttaataaaaattttggatattgaggtacggagggtttttttggttgttgatatgttgtgtttattgttatattttagtgttgggaggttgagtattgtttttatgtttgtagtgggtggggatatttgtagattcgtgttggtttgttttgggttttgttttgtgagtttttgttattgttgattttaacgtatttattgttgtaataaatagtatttttttcgagttttgtgagtttttttagtgaattattgaatttgagggtggttttggggagtttttttagtggtttttttttatttggtatgagggtttaaatatgaaggtttagtaattggttttattattttattttacgttagttgttttttttagttgagtttattttaagtatacggttttgtgttatcggatatgataggtatttttttttagggtttttgttttggttatatttttgttcggaacgttttttttaaatattttttgaggttattttttgagaggtttgttttgattacgaattttgatattatagtttttatattttttcgtttgtttgatttgatttttttcggagtatttattttatttgatttgtatttgggttttttttattttttttttttattgtttgtgtttttgttgcgattcgagttttcgtagggtaggagtgtttgttcgttgtttttgttttttttttggtgcgaggacggtattcggtatatagtaggtttttagtaaatatttgttgaatggatttgtgggtgggtaggggtgcgttttggcgggtgtggtttagagaagtttttaaggaggtaagttttgagtagaagaattttaatgaattttttttttttttttcgtttttataattagatatatatgttttgtggtaggttatatagtgttttttaaaagtttatattttgatttttagtatttaggagtatagttttatttgaaaaaaaaaaaatggtttttgtagatgtaaataagtttaggattttgagatgttggggtgggttttaaatttaatgtttgatgtttttattagagaaagaaaagggatatttggggtgtagagaaataaggtagatagttatatgaatatggaggttagtgttggagggatgtatttataggttaaggcgtgtttgggattcgaggatacgagttgttttagtataataaaatatataaaataagaatagttgtattgatatagattttagatatgattatatatgaatattattaattattagtttgtagtaattattttttattttaatattataataatttttattttataattatagtttaggaaaaattaggttatatagagataggagttaaggggatatagtgaggagtaattagaagataagagtgcgagttttttgttatgtttagatagggttattagagggttttttggtttagcggtaacgttagcgtttgggaagatgtttgttgttaagtggattttggtttagcggtaggcgtagtgttaaggaaaaatatttgttatttagtagatcgggaaagggagttttttttgtttcggtggagtttaaagaagattttatttttttattttttgtggagggtttgatattagttaggttcgtttgtagttattcggaggtttaatcgtttttttgtgatgttgtgttttagcggttatatttttagttcgtttttatgttttattttgtatatttggttttgttttttagatagtagtagtaaattagtgaaagtattaaaagtttttgatatgtagaaataatggcgtaggttgtttttttttttgttttttttttttttttgtttcggttgttaggtagggaagggttttttgtttagtggatatatgatttacgtggttttatttattattggagatggtttattttttttattttgtttttttgttttgtatttaataaatattagtgtagtttggtattcggggttattatcggttttcgcgatttggtggtagtggtttttcgggtttagttgtttttttttttatttttgttttgtgtttttatttttatattttttcgtttttgtatacggggagagatttatcgtttttgtggggttggattttatttgggattgttagggttatgagtggtgaggagagagttttgggatggattttttttcggagttttcggaagtattagttttatcgatattttgattttgtatttttagtttttagtatagtgagcgaatttgtttgtgttgttttacgttatttttttatttttggtgttgttttagtatgattttcgtggtaagaatagtaacgtgataatagttatgtgttcgcgtgtagggatgcgttttagtatttatttttatgtatagagtgggtcgttttattgtttgtttacgtatagaagtggtggtcgttgcggtatattttttttggttttatttaggttgtgttttagggcgggggcgtatttttttttttgttcggttt

SEQ ID NO: 172 - DNA, 9724 bp, Artificial Sequence
  chemically treated genomic DNA (Homo sapiens)
aggtcgagtagaagggagggtacgttttcgttttggggtatagtttgagtgaggttagggagggtgtgtcgtagcggttattatttttgtgcgtgggtaggtagtaggacgatttattttgtgtatgggaataaatgttgggacgtatttttgtacgcgaatatatagttgttgttacgttattgtttttattacgggggttatgttggagtagtattagagatggaggagtagcgtaaaatagtataaatagattcgtttattgtgttggaggttggaagtgtaaaattaaggtatcggtagggttgatgttttcggaggtttcgagggagaatttattttaggattttttttttattatttatggttttggtagttttaagtagggtttagttttatagggacggtgggttttttttcgtgtgtagagacgagagagtgtagaaataaagatataagatagagataaaagaaaaggtagttgggttcgggggattattattattaagtcgcggagatcggtagtggtttcgaatgttaggttgtattgatatttattggatataagataaaggggtaggataaggagagtgagttatttttaatgataggtaaggttacgtgggttatgtgtttattggatagggggtttttttttgtttggtagtcgaggtagagagagagaggagatagagagaaagatagtttacgttattatttttgtatattagagatttttagtatttttattaatttgttattgttatttagaaggtagagttaggtgtataggatggaatatgaaggcggattaggagtgtgatcgttgaagtatagtattatagggagacggttaggttttcggataattgtaggcgagtttgattaatgttaggttttttataagaggtggaggagtagagttttttttaaattttatcggggtaagggagattttttttttcggtttgttaagtagtaggtgtttttttttgatattgcgtttatcgttagattaaggtttatttggtaataggtatttttttagacgttggcgttatcgttagattaaggagttttttggtggttttgtttgggtataatagaaggttcgtatttttgttttttggttattttttattatgtttttttagtttttatttttgtatggtttggttttttttaggttatgattatagagtgaggattattataatattggaataaagagtaattgttataaattaatgattaatgatatttatatataattatatttaagatttatattagtataattatttttattttatatattttattatattggaatagttcgtgttttcgagttttaggtacgttttgatttgtgggtatatttttttaatattggtttttatgtttatgtgattgtttattttatttttttgtattttaagtattttttttttttttttgataaggatattaaatattggatttagggtttattttagtattttaagattttaaatttatttatatttgtaaagattatttttttttttttaaataaggttgtgtttttaggtattggggattaggatgtagatttttgggggatattatgtgatttattatagaatatgtgtgtttggttatgggggcggagaaaggggaggaaatttattgagatttttttgtttaaggtttatttttttaggggtttttttggattatattcgttaaaacgtatttttgtttatttatagatttatttaataagtgtttgttgagggtttgttgtgtgtcgggtatcgttttcgtattagagaaagagtagggataacgagtagatatttttgttttgcgggagttcgaatcgtaatagggatatagatagtgaagaagagagatgagaaaaatttagatgtaagttaggtggggtgaatatttcgggaaaagttaagttaagtaggcgaaagggtgtggggattgtgatgttaggattcgtggttaggataggttttttaggaagtgattttagaggatgtttgggaagggcgtttcgggtaaaggtataattagggtagagattttgaggggaagtgtttgttatgttcgatggtatagggtcgtgtatttggggtgggtttagttgaagaaggtagttgacgtgaggtagggtaatgggattaattattgggtttttatgtttaggtttttatattaagtgagaagggattattgggggggttttttaaaattatttttaagtttaatggtttattagaaggatttatagaattcggaaagggtattatttattatagtaatggatgcgttaaaattagtagtggtaaggatttatagaatagaatttaggatagattagtacgggtttgtaggtgtttttatttattgtaggtatggggatagtgtttaattttttagtattgaggtgtgataatgagtatagtatgttagtagttagggaagtttttcgtattttagtgtttagggtttttattgggttggttatataggtatggttgattttttaggtggttgattttggtttttagtttttgtagaggttaggttgatgttatatggtttaaggttttttcgtagattatattgttagtatagattaggggtgtttaatttgtgggtttttttggtatatattggaagaattgttttgggtaatatttttaaataaaatatatttaatattaataatagttgatgagttttaaaaaaaattttaataagaaagtttatgaatttgtgttgggttatatttaaagttgtttttggtcgaatgtattttttgggttgcgggttggataagtttagtatagaatttggtgtggtcgaggtaaatatagatatttaaattaggtagaatattttaagggtttagagggtgttttttaggagttggttagggttagttttagggtggaggatttgaatattttaaatttttattgtagagggttttagtaggattatttggtattggtggaaattatatataaggtgtttggtgattaaggttggttagaaaagagagattataggggacgtagtagggttagatgtatttttgttaaagaaagaaagaggcgttttaaagggttagtgtatggagttgcgcggaggggaggagcggagttttaatttgggttttagagagagaaggtaaaggatgaggattcgtcgtgaaggagggaggagattataggaaggtcgtgggggttgtgggttgaagggggttttaggtgagaatcggggatagtttcggtggtcggcgtggttggagggtgtgtttagagcggttttcggagggagaggtcgtgtgagtcgggtgggttttttttttatggttttattgttttatgggagttagtcgcggaaaggaaatgcgcgtttgaggagaaaagagaaaatcgttattttggaaagtgagaagatgggtttgtgggcgggaggaggtattggtgggcgggttagggagagattcgtggttatcgattaaagttagtttgggttagtttgttggtgggtttttttttcgttttcggtgttttttcgatttgttttttgggggtcggtcggggaatgagtgcgtggttaggagagcgggtttcgttttcgagttcgcggggttttttgtagttggagggtgtcgtgggtttgggggtttttagatgtttcgggtttttttttagattttaggggagtaatcgcgagagaagtgggcgtttcgggttttaggtgttcgtagggcggggttttcgagggggcggggatttgggggcggtttttttgcgcggggcggggttttataggggcggggtttcgaggaggtgaggcggggtttggggtggggtttcgcggaggattttgggaacgggcgggggcggggattaaaacggggcggggattcgcgggggtggggcgggttttggggcggggtttcgcgaaggaggtttggaggacgaggaggggatagggtttggggaggggtttcgcggagtaggtttgggagacgaggaggaaatagggattggggcggggtttcgcggggcggggttttcgggggggcggggtttgggcgcggttcgggttcggtagttttcggggaagttttgttttggtttcggtaggtataggcggttcgggaggtgcgcgtcggtttcgttttcgggtttcgttcgttcgtcgcgcgttcgcgttttttaatttttagagtcggggttggggttttaggttgtcgcggcggttttaggttgggttgttgggcgcgaggttagggcgggtcgggagaggttgcgtcggcggcggatcgcgtagagggcggtggtttgggttggtcgaattatggcggtttcggagtcggcgtcgaggcgggttcgggaacgggagcgggagcgggaggacgagagcgaggacgagagcgatattttggaggaaagttcgtgtggtcgttggtaaaagcgacgggagtaggtgggcgcgggggttggggtacggggtgatatcgtttttttagagcgggaggggtttggaggttgcgcggggcgtgggggcgttgggagagcgcggcggttggaaattttttcgcggtttttcgcggttcgcgaattagttatttttggatttttttggtttggcgttcgttttgggattttttgagggttagtttttttttaggattatttttttatgtttttggatttagtcgttagttttttggggatttttttcgattttttgaaatttgttttaaatttttttagtttagtttttggataggagtttttggtttttgggggtagttattttttaagttttattttttcgtagagtggtttagggtttgtagtttacgtttgggtttattggaaaggtgtggatagggattaaatttttatttataattttgatatatattagggtatatataattttttatttatttttaggtaaattaagggaatatgttagggttttagagtatttttttagttatggatacggaggagggggtagaggtggtgtggaacgagttttatttcggagataggaaggttttcgcggcgtacgaggtgagatcgttgttttttttttattttgtttgggtgattatttgttgattatttagcgattattttttttttttaggagaagatttagatcgtgttcgagtagttggtgttggtggattattcgaatatcgtgaagttgtataagtattggttggatatttttgaggtttgcgcgagggtgagtacgggtaaggtttcgggtaggtagagattatagttaggtggggcgggtatggggacgaattcgtagttggtggaaattttgagttcgtatcgtgtaggttatttttattatagagtacgtgttattaggtagttttaagtaattttttaaaaagattaagaagaattataaggttatgaacgttcgggtatggggagcgggttggggtagttacggggataggacggggttggggtagtttcggggattgggatggtgagggggtgttcggcggtttcggataggggttgggcgaggatgcggggcgggtttcgtaggtttagtcgttttttttgcgtttattcgatcgacggagtcgtgcgttcgtcgttaggtttggaagcgttggtgtacgtagattttgtttgcgtttaggtgagggtttgggttggtttgggcgcggcgttatcgagtttttatttttttagagttttttgatcggttttttttatttttttttttttaacgtttgtagttttttgtacgtttgtagttttttaattatttacgggaatttgattagcgatattatttttatttagtataacggttttattaagatcggtttcggtgttggcggggtagggttgggtgggggaacggggtaggggaaggtgtttggagttaagggtagaggagttttgatgttttagtagttaattttattttttttttcgttttttggtagtgtggtatcgaattttttttaatggtaagtgcggattttggggggacggggttttggagaggttttcgttcgtttagttttgcgtttttttatagtatttttagatgattttcgaagttttattcgcgttgagcgagaggaatttcggaatttgtattttttttttttagagtatggaggtgagtggtgttgggttcgggtgtttcgtgtttattttgcgttttttttttacgtgttttgtgtttttttttgtttagaggtggtcgatgggatcgttgtggatatttttttttttgggatgtgtgcgttggaggtattgttttcgttttttattttgtgttttgttttttttttaattgtgttttgtttggtttatttgtgtggttttttttttatgtttgatttggttttgtgttttagatggttgtattggaaatttagattaatggggatattcgggttatagaggaggttattgttcgcgttaggtattcgttgagtgattttaatatgcgggtaagtagtttgttttgtttttttttagttggtttatcgtgtttagttagggttagtaaggtgttttaggtagatttgggagaatattatagtttgtgtagttgaggggtatattagttgattgtattttttttaaagaggattttagtgggagtatatattggttttaggtttgaaggttttaaggggttagtatattttaaggataagaaggtaagagagattttttttttgtggttgttattattatgttcgttttataaagaaattaaggtttagaggagatgagttttttgtttaaggttttagagtgagtggtggagttaatatttgtatttgggtttgttttattttaagtttttgattttaagtttttaggaggtgatgaggttttagtttgtggggggatatggtgggtgttaagtaggtaaaaagaggtatgggatggaagttgtatttatagttttttttgttcggagtttagatttaattttatggttttaggagatgggggtgtttggtcggggttggtggcgagttggagtcgggttgggtacggatgtggatagagtggggatttattaaggtcgtttttagtgttgggttcgagttgagtcgattaaaaggttatgggtaggaggtttgtaggtgtgattttaggattatggtttttttttacgattttttgggggtcgagggaagtagagtatggtgttttaattttagaatttagttgtttttaagtttagaggattaggttttggtttggttgttgttgttgggatttttttttatgggtatttttgtatgttttgtgtgtttttgaggagggatatggggaatttaggggttattttttttcgaattgcggggttagagtagagagtttttgtatattattagttttttttttttgtgttttaggagtttattttttgttgtttggttcgggattttgttcgtcggttttttgtttatagtttttttttttatcgcgtgtttttcgaggtgtattcgttgaagtttttggtagtttattgttttatttagtattagtgtgagtagtaggtcggttcggggggtggttggggaggtggaggttgggacgtggaaggggttttgtaggatttacggtttgagtatatcgttttgatgtttttgtggtcgtagattttatgtttgagaatgtggtggaggagaagattaaggttatggatttgtacgcggttttggcggagttttttcggtttcgtaggttttcgttgtagtggcggtgagtagttagtatttagaagttttttttttttatatatttttttttcgtatttttttttttttcgtttcggttagttttttatgtgttttttatttttatgttaggtattcggaagttttttttatggagttggataaatttttggaggatgttaggtgagaattgatgtaaggttgggggttaggtagttgttaggtttgaatttttagttattttgttgtgtttttaggaatggaatttatttattgatgaattttgtagttattcgatttttggggttgtttcgtgtgttggttttattttcggaggaggtttaaaaggttaagatttcgacgttagagttttttgattttgagattagaaaggtgagtttttttttttgttgtttagtgttattttttagattttttaatagttagataagaggtgttttttttttttttagggtttgtatttttatagtttagttttttttttggttgttagagattagatttaggttgatttttttgtgggggttatgggggttataggataggttgggtatttttttttttcgggaggttttttgtttttttagattttttttttgtattttgttgtttgttttgaatttattttaagtattttttttttagaatttattcgggtttttttattttgttagtaatttttttttattttcgtattttttttattttttttttattttttttattttttatttggtgttgattttcggatatttatgttttggtgtttttttagattttttttgtagtatttttttttggttaggggtttttttcggtgtagtgtagttagaatttatgttttaataggtaaattgtttgtttttggttgttagtagagattatgggagtttttagttgacgtttaggttttgggaggtttgatttcgtaggtatcgtgtatttcggcgcggttttgtttcgtttaatttttttttttttacgtttatagttttttttttgtttaagttgtttttttcgcggtgaaagtttttatttagtttttagtatttagtttttaatgtcgatttttttcgaagttttttttagtttgttaagttattagtagtgagatgggttttttttagagatttttttttttttagtttttgttgttttttttcggtttttttggggtcgcggtatgtggttttgttgttgggtttgtgagttttagttttttttcgttgtaggttatttagatgtagtgtaatttggagagaagcgaggataaggcgcgttggtatgtgagcggggtttgggagggcggcgttgtcgtggggaaggcgggagcgtggcggagttttgaatttttagtcgattacgtttcgtcgtttttttagtttattttgtttttggtgttggaagatcggttgtatcggtagttgatttacgatttgtttttaagtaggttgggtaggggatttgggcggcgggcggtgattttaggcggcgggtgggtagcggttttatgtttcgttttacgttattgttttagcggatagcgtttaggatttcgtttcggagttcgtgtattatggttttttttacgaggtgcgttgggcggtgcggcgcggtttggcggagggggcgtacggggtaggtcgcgttttttcgttttttatgttttttttttttcgtaggacgatcggatgaagttggtcgtttttttggagagtattttttttaagtatcgtgggatttaggtttgattcggagttttagttttaggggattatgtcggggtgttgtttgggtaggttatgttggggagattttagtatcgtggggttgtttttttttatgcgtttgggagtataaaggtttcggtagtgaaggaatttttcgttttttgagagtggggttgattttgttttgggcgtcgagggg

SEQ ID NO: 173 - DNA, 1301 bp, Artificial Sequence
  chemically treated genomic DNA (Homo sapiens)
aagtagtcggtgtcgtttttgaatatattcgggtagggcgagtaggatgtttttgtttagggagatttttttttttggttttggggaaggtgttttttattttcgtaggaggttgggtttgtaggacgtagtattgggcgggtgagagaaagtttgggtagaagagtacggagtcggcgattggacgcgagtaaggggcgaatggagagcgttttttttgcgttaatgttgttgtttcgggtgttgaaaagtcgggaatttttcggaaagtagcggtatttttttttttggaaggtgggtgtgggggttttaggtttcgtatttgttaaatttgtttcgttatttgggaggggttcgttagatgtgtttttttttagttttattttggggagaacgatgggggcgggggcgtgggggtgagtatagtcgggtattttcgtatattcgtaggcgggatttcggggtgtttttgttttttttttttgggtagtcgtacgtcgggatttttattttatttgcgcgcgaattttcgttatttgggatttaagcgttcgcggtttgagcgttgcggtaaatagaaggtattcgcgtgggtttttaagggtgtttgtgtgttgggtttgggggagtatgatcggggtattcgtagtggggaggaagaggtgttgttggtcggggcgagttgtttgtgttaaggtcgttttttgtagggcgagttcgtgtacgacgacgtgtgggcgatcgtgaataattttaacgtgcggttcggcgggcgtttcgtttcgttgaggtatttttattaacgattttttgggttagggtatggtcgagaatattagttataagttttagcggtcgtttagcgtttttatttttaagtgtatttttgtttagggtttttttttgagttagggtcgggtgtagttgcgggattggtttgaagggaatttttattttttattacgttttggtttttttgtttttttgttttttttattttagttgtttacgttattaggtttttaggttttttttaggttaatttgggtttttgggattaggcgggaggcgcgcgttggggagtttttttcgagtttttagagtttttcgaggtgtttgcgttttaggttgtttgttttttttggatagatttgggaatgggcggttggagcggttattttatttttttttcgttagtttttttgggtgagtaagaaaattagttttatatagttggtttcggaggtgtggtgtgtgtggaaggggcgggggaaatgttgtttttagggtcgtaatttttt

SEQ ID NO: 174 - DNA, 1301 bp, Artificial Sequence
  chemically treated genomic DNA (Homo sapiens)
gagaaattacggttttgaaaatagtatttttttcgttttttttatatatattatattttcggggttaattgtgtaggattggtttttttgtttatttagaggggttggcggaagggaagtgaggtggtcgttttagtcgtttatttttaggtttgtttagagaaaataaatagtttagaacgtagatatttcgggaaattttggaaattcgaagggaattttttagcgcgcgtttttcgtttggttttaggaatttagattagtttggagaggatttgggagtttggtggcgtgaatagttggagtgggagaggtagggaggtagagaggttaaggcgtgatgagaaatagaaattttttttaagttagtttcgtaattatattcggttttggtttaaagggaagttttagataggagtgtatttgaaggtggggacgttgagcggtcgttaggatttgtggttggtgttttcggttatgttttggtttaagaagtcgttggtgaagatgttttagcggagcggggcgttcgtcgggtcgtacgttggggttgtttacggtcgtttatacgtcgtcgtgtacgaattcgttttgtagggagcggttttagtataggtagttcgtttcggttagtagtatttttttttttttattgcgaatgtttcgattatgtttttttagatttaatatataaatatttttgggaatttacgcgggtgttttttgtttatcgtagcgtttaagtcgcgggcgtttgagttttagatggcgaaagttcgcgcgtaggtggagtggggatttcggcgtgcggttgtttaggagaggagggtaagggtatttcggggtttcgtttgcgggtgtgcgggggtgttcggttgtgtttatttttacgttttcgtttttatcgttttttttaaaatggggttgaggaggggtatatttggcggattttttttaggtgacgaggtaggtttagtaggtgcgaagtttggaatttttatatttattttttagggagaaaagtgtcgttgtttttcgggaagttttcggttttttagtattcggaataatagtattggcgtaggggagacgttttttattcgttttttgttcgcgtttagtcgtcggtttcgtgtttttttgtttaggtttttttttattcgtttagtgttgcgttttgtagatttagttttttgcggggatagggagtattttttttaaagttaggagaaggggtttttttggataaggatattttgttcgttttgttcgggtgtgtttagaggcgatatcggttattt

SEQ ID NO: 175 - DNA, 22355 bp, Artificial Sequence
  chemically treated genomic DNA (Homo sapiens)
aggtgaatatatagtatttttcgggttttatattagttttgggcgttagggatatagtagtgaatagaatagatggagttttttttttttgtagcggggggttgtaataggggggtttattggataaggagtatatttttattagagagaatattttagttgggtgagcggttttgtagggggttagtttgggggaatttttggagacggtgggaattgaataaagtttttggggaggttaggtacggtggtttatatttgtgattttaatattcggggaggttgaggttatagggagttatgattatattattgtattttagtttgggtgatagcgagattttgttttaaaaatttaaaaattgggttaggcgtagtggtttatgtttgtaattttagtattttgggaggttaaggagggtggattatttgaggttaggagttcgagattagtttggttaatatggtgaaattttgtttgtattaaaaatattagagattaggttaggtatagtgatttatatttgtaattttagtattttgggagatcgaggcgggtggtttatttgaggtcgggagttcgagattattttgattaatatagagaaatttcgtttttattaaaaatataaaattagtcgggtatggtggtatatatttgtaattttagttattcgggaggttgtaattttagttattcgggaggttgaggtaggagaatcgtttgaattcgggaggcggagattgtagtgagttgagatcgtattattgtattttagtttgggtaataagagtaaaattttattttaaaaaaaaaaaaaatataaaagattaggtggaggttgtagtgagttgagatcgcgttattgtattttagtttgggtaatagagtaagatttcgttttaaaaaaaaaaaaaatttaaaaagcgttttgaaggagttggggggggagagaagatagggtcgttagggttttgagcgtagcgttagtttgtgtggggtatgtaggttgtgttttacgtttgtgttgggagagagagtagatggggtgtttggttttgtgagtggttgtgagtatgtgtgttcgagggtaagggggattttgtttcggttgtatgggtgttaggtttacggtatgtttcgggtgtgtgttgtgcgtgcgtgtatttgtacggtatgtgcgtgtatgttgatatggtagtcggtgtatttgtggtttttgtcggtagatacgtgttttttagtttttcgtttttttttattcgtttttttttttatttttatttttttgtttttattttatttttttgagttgttatgtggttattattatttttgtggtttttgtttttagggtttttgtgtattttttttttttagtgtttatttgaatttttttttttatttttttatgttttagtttgtggttcggtagttttttttttaggtttcggggttattttcggaaggtttggtgggttttgttagggaaggggtttataggatttttcgagggttgtggtcgttaatcgttgagtgtagggtgtgagcgggattcggatattttttgagggcgggaattaggtagtgttttaagagatgttaggtgtataggggttgggggttgggttggggggagtataggttttcgggagttagaaggggattggggttgtggtttaggttatggatagagtagaggcgtagggatttgaagaagtagagggagaagtttggttaatatagcgagattttatttttatttaaaagataaaaattagttgggtgtggtggcgtgtatttataattttagttatttaggaggttgaggtaggagaattatttgaatttgggagggggatgttgtagtgagttgagattacgttattgtattttagtttgggtgatagagcgagaatttattttaaaaaaaaaaaaaaatagtgggaggtgacgtggtgttgtagaggcggtagtggttaggatagcgggaggggtacgggaggtgaggtttttaggttagttatgaacgttgggtttggttgtgttttaaggtttttagagttttttttttgtttttgtttggttttttaggaggggagttagggggtatagtttttgtaggggttggtaggattagataggggtaatgttgggttttttgtattgggattgaggcgtttttttgttttttttattggttgagattagggttttgggtatacgggagggacggggtttagttgttagtatggagcgggtttgtttgtttatattagtttttgggtattagttattaggagtttgtagaattgtggggagaaaaggtggacgaggtaggaggaaaagaggggagaggggtttgttggttgagggttttggagagcggtaggttttagtttttgtgggaggggtattttggtaggtgtgtgtagtcgttgttagggtttttaggatgtgacgtgttaggattggtttttttggaggttacgttagtatttcggtttttgtttttgtattttgttgttagtttagttagggagattttagttttttcgggaagttgtttttttgttttaggtttttttttggtttgtttttgtagcgttttttttgggtatttgggttttagttttggtttttgtttgtttgtttgttttttgtttttttatttttaatgtcgtttgtttattttagggtgtttgttgtttgttcgtcgtttgtttattcgttgtagtatgttcgagttgttcgtatgtaggttgttggatgagttaattttcgtttggtttagtattggttttatttggtttcgttagtttttgtaggagttgtgttttcgagttttttttttagaggatgtaggttttttgaggttttgttttgtttttatgggttttagttttgtaggttaggttaggaggtttttatgttagtttattggttcgaggggggttttttttgatttcggaatagaagatagggtaaggtagtttgaagtttgggtttcgtgttcgttgtttttttagcgtggttttgttcgtttttgtttgggagttaattttagtgttattagtagagttatagtttgggttagttttggtaggtatttcgttttggtttatttattttgtgggtgttgtggttttgggtttgttttttgggtagaagtgggaggaagtgtatatatttgttagggaggttttttggtcgagggatattttaggtttttatttcgttttttcgttagcgtagatttggggtttttttttttttgttagttttttttatttttttttaggttaggggatgagataagggattttgagaatagtttggggtgggagggagattttagtttttttagtttagtagggtagggggttgtgttagtttagttcgggaaatttaggaggggaaggtgagggtttcgatttttttttggagtgttagatgtggagttgatattagttgggcgttgatttttttttttgttattggtttttatttttttagttttgtagttttcgttggttaacgatgggggtagtcgttcgttatttttagagagtttttcgtagtattttacgtttttcgttcggtttcgttatatgttggggttttcgttaattttgtttatatttcgtagtatggagaggtgagttaggggtttagtagggttgggtgggaagtagtattgaggggttatcgtgttagttttgggaggagggtggttaaatcggtgggaatttcggtatgggggattggggtggttaatttaaggttaggatttatttttatcggtatttgttttatgtttttagtattgagattgattagaagttgtaggagattatgaagtagacgggttatttgattatcgggggttaggtattatttttattgtggcggggagagggaggaggtttagttaggttggatttattttgggagcgttagtggggggtagggggcggtggtagaggttttagggattttttaattttttttttttttttagcgttattaggtagaaattaacgatttggagaatttgggcgagatgggtagcggtatttgcggttaggtgtggaagatgcgttttcggaagatcggttacgttattgtcgttaaggtgagttttggcggttatttcggttgcgttttatattttaggtcggtgttgaggtttttttttgtttttgtttgtgtagtaaatgcggcgtttcgggaataaggaggagaataagcgtatttttatggatttggatgtggtgttgaagagttacgattgtttttatatcgtgtagtgttttgggacgtttattattaacgtgagtatttggtcgcgttttgtagcgttttttttttttttatttttgtttttttttagggagtagagtttttggggggtgggtcggaagatatagttttttcgggtgtttttttttttgtagacggacgtttttatcgttatggagtttatgggtatttgcgttgagaagtttaagaagcggatgtagggttttattttcgagcgtattttgggtaagatgatagtggcggtgagtgattaggcggggtttgtattgggtaggatgatagaggcggtgagtgattaggcggggcgtgtattgggtaagatgatagtggcggtgagtggttaggtggggcgtgtatcgggtaggtggttttgggtttgtgttttttgttatatgtatttttttttgcgtgtttgtagattgtgaaggcgttgtattatttgaaggagaagtacggtgttatttatcgcgacgttaagttttttaatattttgttggacgagcggggttagattaagttttgcgatttcggtattagcggtcgtttggtggattttaaagttaagacgcggagcgtcggttgtgtcgtttatatggtagtgagtgggggttttttagcgggggagggggtgggggttgggaggtcggttttagttttggagatacgttttttttttttttttttgtagttcgagcgtattgattttttagattttattaagtcggattatgatattcgggtcgacgtatggagtttgggtatttcgttggtgagttggggtttttttttgttttttagttaggagtgagggtttttgggggattcggagggaggagaatataaatttgtttagttttgttcgttttttttttaggtggagttggtaataggatagtttttttataagaattgtaagacggattttgaggtttttattaaagttttataggaagagttttcgtttttgttcggatatatgggtttttcgggggatttttagtttttcgttaaagattggtgagaatttttttttatttgggaggttagggatagttcgttgttttgggtagttggggaggtaatggtaggaggggaatggaggtcgtattttgggatgggcggatgcgattgtgggcgggtttttggttggcggttgttataggagttggagttggtgtttagggagttatgagttgggtttggatttagtttgaggggatagttagttttgtggtatttggcggggtggttgttggagattgtgagtacgtttttgtaataagtatagttataagtttaggagggttatgttcgatttttttaggggagttttatttatttttttgggggattttagttagttttggttttttaagttaggtttttgttatttggttttaggttaggaggtttcgggatttatagttgtttttcgttgttagtcggggttttgaggatatttatagtttttttttttatatatattttggggatttttggttttttggggagggtttgagtataggggtggggtcggtatttttttttttttcgtttttatatttgttttttttttttttgttttagttttattaaagattataggaagagattaaagtataataagttatttgtgagtatttgagtttttttagttttcgttttgtttttgcggaggcgcgaggttaggagggaagatcgtttttttttaagttttattttttcgggtttataggaatatagttttattaagcgttacgagacgttggaggtggacgtggcgttttggtttaaggatgttatggcgaagattgagttatcgcggattagcggcgttttgagttagttttatttgtttttttttaggtagttgtttggcggcggttagttttatagggggttaggggtatggttataggtttttttttttatttggttatttagttgtttgttaggggagatttgggatttggacggttatttaggattgaggatagagagtggggggtgtttatttatttttttcgtttcgggtttattaagttttcgttttttttatttcggggttagtcggtcgtgtgcgtttttcgatagatattgtgaacggaagatagtaggtcgcgattagagtcgttgtttatttagtcgtagtttttgggtcggggcggtttttaggggttaggagagagttttggagtttcgtagttattatgtacgtttttagcgtgttgtgtttttcgttatttttacgcgttcgtttttttttcgtcgttttttgttttttgttttatttttttgtttttgtttggttttttcgttattttttttgtttttgttttttttttggtttgagtttgggtttagttattttttgacgggttttttgggtttgtataggttttttatggcgtaatgagttagtggtttttagttaggtagtgtgggtattgttattgcggttggacggggttgcgcgttcgcgttttttttttttttttttttttttttttgattttagggggttttttttggagtttattgtattttattgtatttggtggggtgtttggggtgggggcggaggagagtttgttttcgtggggttgtcggtatttttagaaatttttattaaagttacgattagttgtttgtggtggggttttaatcgttttcgggtattggggagttgggttggggttgttgttttggggttttcgggggttatagtttggggtgagttgaagattttaggggatgtggaggggtttgcggggttttggtcgtataggatggtttttagggaaggtggttttggggtatggtgtagagtaggtgatcggagggaatcggtgacggagcggggttaagggaggggttcggagggagttagggatggagggtagagggagtggatgtgggggtttgaggacgtgtgataagttttagtaggggtgggggtcgggttgagggtgggggtgcgaggtggttatttttatcgtgtttttggtcgtttttttatttatttatatttggtttagtttacgttgaggtttaggattgggaaggatcgggtgagtgtatcggggatttaggttaggtgtttttcggagtttgttggggtggttagagtaggagggggtgtgttttttttttgtgggtgttgtatgtaaattaagtggataagaaaaaataataaaataaaaaataagaaaaaaaaaatataaaatttcgtaaaattataaagaaaatttaatattaaaggcgtagaagtcggttggtcgtggtgggggtagcgtaggcgtagtatttttttttttttatttagtttgttgatttttgttattattatgatatttataaaacgtcgtatgtttaaaaagttatagatgttattttttttttgtttttagggaggaaagttatttttttttgttttttggtttttttgttaggggttaggggtttgtcgggtgggggtgttaataggtttggttttttttttttttgtatttagttatgggggtttttgcgattgtcggaaggttgtatggttggttttagggttagtataggttcgaggtcgggttgtttggttttatttttatttaattttattttttgttttatgagtgtgtgttcgtttatttttattttttttagtgttaagtggggagttttgggggagttttttttgttttttagttttttttaagattttttttttcgttattagttatttttttggattaggtagagggcggatcgggtgggtaggggtttgagggtggttcgggttagtttattagttaatggatttttttttaggtcgttagtgtcgttttgtttttttttaaaataaaatgttttcgtttgtaaatttttagacgtttgagaataaatttttttttttttttttatcgagtttgtggtgtgttatgggtttggtagggcgaggtgggaagggggtggttgcggggggaggtttttgtattgaggggagattgaggtaggtttgggagttagacgggaggtgtttgtagtgatttgtcgatgggtattaagtagttggtgtaagggattttttgtttttagtggttataggtcgggtagtagaggattttttaatttttttaggttttgggtattggttttggtgttagttttttagtttgttattttcgttttttgtttttttttttgttaaggatagggtcgtttgtttacgtgcgggatttgggtgtagtttagttggtgtttgttttggttttaaatatttcgattttagttggtttagtatgttgggtatcgtgttgttgttggttttgtttttagggattattattttatttagcgggttatttggtatgtatgggtagggaggtgacgggtttgttatgtttttatttttgttttattttttttattttttttgagatggagttttgttttgttacgtaggttggagtgtagtggcgtaatttttatttatcgtaattttcgttttttcggtttaagtgatttttttgttttagttttttgagtagttgggattataggtacgtattattacgtttggttaattgttgtatttttagtagagatagcgtttttttatgttggttaggttggtttcgaatttttgattttaggcgattcgttcgtttcgaattttttaaagtgttgggattataggtgtgagttatcgcgttttatcgatgttatttttttttaattagatttttggtggtggtttttatgggggtggggatagggtaggggagtggggtggggtttttgttttttattttaagggtggtttatatttttatttcggtaaagttttttgtagttacggagagggttagagttgtgggagggggttagtttatttaggtgttttttagaagtgggtgtggtgtgcggatggataagggggtttatgtttgtaattttagtatttaagagaggttgaggtgagaggatcgtttgaagttaggagttttagattagtttgggtaatatagatttcgtatggtcgtggtagcgagtggttgtggttatagttattcgagaggttgaagtaggaggatggttggagtttaggaggtggaggttgtagtgagttgtattcgtattattgtattttagtttgggcgatagagggagattttgttttagaaaataagaaaaatggatgtgtaggtaatttttcgtatttggagattagtcgttttattaggatttcgtttagtatttgaaggtagatattagcgtgtgtttaggggtacgaagaggggaggggttttatggttgttttagtttggataagtggaagcgttttagattttggtggtttggttgggttttggttgtgtttaggagagttttttgggagggtattttttttatttttttttttcgttggtgatagtatttatttttttttagaaaggggagtcgtttgttttgttgcgtttttaagagtagttttggggaaggtgggggagttttgattttatttagtcggattttattatcgggtgttttttatcgtttttttttcgttttagggagggtttcgttagtttcggaggtttttttaggggcgtatggttttgtaatcggtttagttgttgggttgtgcgagttttaggggtcgttagggggtatattatcgttaggggggaaagtggcgcggagtttattatgggtgaatcggtcgtcgtaatcgtattttttttttaaaggcggcggcgggggcgaggtggtcgggttatttttttcggaggtttaaagggtagcgcgcgtttttttttttttgggtcgttttttttcgtttcgttagttttttcgtttttcgcggcgttcggtttttggttgcgtagatttttttttagtttgaagttgttcgatatagaggacgttttttttcgtcgcgcggggtcgttcgaggtttcggtcgatagtcgcgtgttcgtgtaggtggggatttcggggatattaggggcggatgggggtcggtggggacgggcgatttttgatggcgttttcgttttttaggcggttttggttcgttttttttcgcgttggggtttggttttgtatcgttgtttagtgacgtcgtttttacgttcggtttcggggttcgttttggttttgttgcgtgagggttgtttcgtcgatatttttgtcgttttttcgttatcgtcgtcgtcgagttcgggtgtcgttcgtttcgcgcgttttagttttcgtttgcgttcggtttttaacgtttcggtgtagtttttgtattgttagttgagtcgttgtcgtcgttttcggggagttcgtcgggcgtttgcgtttttgacgtcgtcgtcgtcgtcgtcgttatcgcgggtgcgcgggcgtagagtttggaattcgggcgttggggtttttcgggggttgggtacgggcgattttggtagtggaaagaggatattttcggggtttgaggatttgggggttgggggaggtggggcgtaagggtttatttttgtcgatagagttttttcggggatagtgtggatattgggtttttttatggatagttttggaattttttagggttgggggttggatgtagaaggttattaaggggatatatttttgggaatttggtgttgggttttatatgttaggtgttgggagacgcggattatgcgattttgtggggttgggatttggggtttttaggggttgggcggttagttatttgtatgcgtaggggttgggtttagggtattttaaggggtcggatttttaggggttttattttggttgtggtggagagttggatttaggttttttttgggggttttggggattagagttacgatttcggtgttttgatgttttcgttttttttttattttttttttttttagtgtttgttttaggacgaggcgtgcgtcgatattggtagtggtagcgtcgagggtttggttgttgacggtttttatttgtatacgttgacgtagtttatcgtggttatcgtgtcgcggtcgttttttagtgagtacgtagttttttttcgtatggggtcgtggggcggtagagcgggtgggaaggacgtttgggagttggatttagttttagcgtggtattttttatagggtcgtttaagagtgttttcggtcgtgtagtgcgttttgagtttttcgcgtcggttttcgcggttttggaattcgcgtcggtggtggcgttggtgttggtagttttcgtgttgggcgtcgcgttggtcgtcgggttgggtttcgtttgtgcgtatttaggtatcgacgattttcgttaagtcgggtttttagtttaatttcgcgcgtcgggattcggggcggtcgcgatttcgtttgcggggtttgattaattttagttaggtttgttttcgcgatgttcgtagtagtttttaggggtcgtttttagtttggcgtggcgcgtagtagtttttttgtagttcgttttttttttttagcgttttacgtttttggttcgttcgcgagagtttcgtttagcggtttttagtttaggaggttttagtgaggaaggtaggtatggaggtggagggagttgggtgaggtaggagatttgatagtgacgttttttagcgtttagttcgtgttaggtattgtggtttttttgtttgtttgtttgtttgtttgtttgttttttgagacggagtttcgtttttgttgtttaggcgggagtgtaatggcgcgatttcggtttatcgtaatttttgtttttcgggtttaagcgatttttttattttagttttttgagtagttgggattataggtatgcgttattatattcggttaattttgtatttttagtagagacggggtttttttatgttggttaggttggtttcgtatattcgattttaggtgattttatcgtttcggttttttaaagtgttgagattataggcgtgagttattgcgtttagtttttaggtattgttgtaaatgttttacgtttatgaattaatttaatttttttaatttttaggcggatattattataatttttattttagagacgagaatgatgaggtattttttgaattaagtaatttgttaaaagttataatattgggtggagtttggattcgaatttaggtagtgggttattcgcggtaggcgcgggttttgggtcgagttaggggtattaggtgaggagaggtattaggcgaggagaatttagtattcggattcggtttttatttttatttcggtatgtagatcgatggaagaggttagtggtttgttgggaagggaggtggttcgcgtagcgttttttttttcgttgagttttagttattttttttagggatggtgcgtttttaatatggttcggagatatatttagttattaattcgggattaggattaataggatcggattcgtttttttggatttcggatttgatgaggttacgatttttgcgttttttttttttttttgttttttttatttgtgtttaaaataaatttttggattgatcggttaagttttggtgtagttagtgagcgcgtaacgtgcggggtgggggataggtggggaggtttggggagaaagttgggagtaggatttggggggtatttttgagaaatcgtgatttataggggtggagtttggggacggggtttatatgtttatatattcgtgtgtatttttaggttatgggagattgtagggcgttttgttttaaatagaaagcgatattcggtcgggcgcggtggttttcgtttgtaattttagtatattgggaggtcgaggtgggtggattatttgaggttaggagttttagattagcgtggtcgatatggtgaaatttcgtttttattaaaaaaagtaataaaaaaagaattagtagggcgtagtggcgcgtgtttataattttagttgttggggaggttgaggtaggagaatcgtttgaatttaggaggtagaggttgtagtgagtcgagatcgcgttattgtattgtagtttgggtaataagagtaaaaatttgtttaaaaaaaaaaaaaaagcggtatttaattttataagcgtaagtttaaaataaatttttttttttttttttttttttattcggatatttgtttatttgttttttgcgattttttttaagttaggtttttttcgttttttattattttcgttcggattttgttttagtttcgtttcgattttttgtttttgttttagtttttttttggtttggatttcgttttttttttagattgttagtttagtttagagttttttaaattttttttgttcgagttttattttattttatatagataagagtgggattattagttttagtttatagaggaggaaattgaggttcggtaaggttaaattatttgtttaaagtttttaggtttgtttgattttagagtttaggtttttgatcgattggattttcggatttgatttttcggttagaatttatttttttgcgagaagtaaagtatatagtagtagttttatgagttagtttagtaatagagggagggtatgggatttaaggtgtcgtttttattttatgaatgagataaagtgtaggttgagggtttttttcgtttcgttttagtttcggtgtcgattttttttttatttttattggggcggtttttcgggtttttaaacgcgaagttacgtttttacgcgcgttcgttttcgcgcggttttttttgatttcggcggttttcgtagtttcgtttatcggagaagcgattttatagcgtttgtttttttttgagcggtatgaagttattttttaggcggcgagcggtttcggcgcgttatttgggcgaggtgatcggtttcgcgatttggagcgttcgcgagaagcggtagttagtgcgatttttgtaggcgcggtagggttagtcggagtcggacgttatcgagttggttcgggagttgcggggtcggagcgaggttgaggtgagatgcggttttcgggatcggagttaggttggaggcggggttggggtggggcggagagtgggcggggttgcggtaggagttagcggggcggggttaggaatgtaagcgagcgggggcgtggcgtggggttgagtggcggggcgttagtgggtgagtttgggcggggtgaggggcggggcgtggacgggaagagaagatttaggggcggggcgagtttgggagttagacgtgggcggggtataagtgaagcggaggggcggggcgatgtcgggggcggggcgtgcgtgtcgttgaggtttggagagtgggtgggtgagtttgaggggtaggacgagtttgggggcggggcgtgggcgggttaatagtaagatttaagggcggggtcgttttgggagtaaggcgtgggaggggcgtgggcgggatgagggtaagttttaaaggcggggcgagtttcggggtaatgcgtgggtgaggcgagggttaaacgggcggaatgaattgggagtaagatgttgtcgagttcgggcgaaaagtaacgtatgttgttggataggatacgagtttgaagtgagagggaatagagaagaggggacgaagaagggagttgaacggggtagtagttagtatagggttgggttttggttgcgtgaaggagtcggaattggtttgggttttataatttttttaggtagttggttacgttttgggtggggtaggggttttggtagttattgggatttttaatatcgggttagtaggagattaaggcgtagtagcggggtttagagtatataagggattgggttttggtttttttgttgtagttttgagtttatagaagttttatttcgtcgttttttttttttttagattcgggtttttttttagtagtttaagggtcgcgtagttcgggaggttatttagaaagtgtattcgggtggtttttagggattaaggcgtcgggaggtatagtttttagtttttatagaggtgaggtagatgaatagggtgaggttgtttagggtaggtttttggtgggtaggtgggagttgcgggggataatttgattaggggatttttaggaggagtagggtttggggggttattgtaggttgatttttgggttgattttgtatttttggttttatttaggtttggacggatttggttgagaagataatagggttattggaagaagttttggtagtggttttttcgtaggtatcgttatttttttaggtaggttagggtgttttagaggatagggttatatgggttaaattatgtgaatttgggttttgggtttttttgttagttttgtggatttcgttagttattggatatttcgagttttagtgtttttggttttgaggttattttttgtttgaggagtattttagggtggtagggaggatgggggaatgtgtagacggtgagaagattttttagtttttttttttttttgattgttttgtttgttaggtgtttattatcgcggttacggaatcggttatttttttgtattttaagttttttaagtttacgtaggttcgtggaaagtttttgtttttgagcgtttttggaggataggaagatttcgtttttgaaatatttagttttgtttttgttgtatttagtttcgtatttaggatttttgattttgtttttgagaaattttttgagtcgtcggttggtttttttattgaagaagattttgttgtggattttgagaagatttataagtatttgttttttgtttttcgaagtggtcgtagtttcgagtttttagtagttggtgagaagggtgagggagggggtaggagtagagggattaagggtttttggtagtaggtaggggtgtttttttattttttttttttatttattattagagttcgttgtggttttcgatttgtttatgttatttttagaggagttgttatttttgttttgtatagttttggttgagtatatgacggagacgtatttacgtttgatagttttttagtttattttcgttggagggagtttggggtttgtagtagaaggggatggggttggttttaaggtattagaggagatttttttagttatcgagaaggtcgagtatagcgaattgaaatcgttttggtaagtagttgggatttgttttttgaattcgtttttggtgtttttggagtttttgggtcgggtagttatttttgttaggtgaggggtatggcgggtaggaggttatattaggtttttcgttttgtttttcggttttgttcggttggttttggttttttttgaggatttcgttatgggggaaggtttttgagatgatgtttagttgtggggcgggtttttaagatgttttatattttgggggttttagaaatggaattttcgttgtataggggttgggtgggggttgtaggattttatttataagttttttgatgttaaggataggcggatagggttggttttttttagtttttaagttttattgtgttttgttgtttgttggggggttatagttggtattgtttatcgtaaaggttttcgtatattttttttttttttgtatatttcggggttagtatttttattttttttaattgattagtcgtggttattttttgttgttaggtttttttttttttcgggggtattttgtgattatgaataaagttattatttttttttttttttatttgtgatttaaagatggaagtgggggttttgaagtgttagagtttgggggttatagggttgggggtgtgtgttagggaggagagttgttatttgattggtgtgatgaggtttggggtgaggagttttttggtgattgtgaagttgataagtgtggatggggagagtcggtagggtattttggggataggcgttagggatgggttttagagtagggtaaaattatatcgtataggtggaggggagaaggtagtagagagtgggggtgattcggtggaaggagttgagttttaggttgggcggttagaggaagatagataggggtgggttgtttcgagtggtaggaggttagtgggagtggagtgttttttggggtggttttgggattttaaggatttttagaaggcggggagggaggggtattggagttagggttgattttaaatttttgggggtgttgggatttcgtttgaggttttttttattagttttatttgttttgtgggtgtggatcgagggtcgggttttagagagggaagtagatgtttttttacggtatcgcgttttacgtttagttagtaatttaagtcggtaaatttttcgttttcggagtttgtgtatttatttagtttgttttttatagaaacgtttatttttttttttatatattgtatacggtttttttggggtgtatattttttgggagggttttggagtatagttagtttatttcgttcgtggttatcgttttatcgtattagatttataaacgttgttaatggtggtgggtagggggaggaggtttaggttgtaggtacggtcggtcgtcggagtttttttttagggttggtagagggtgcgttttttagttttttatagggttgagttttttttattattttcggcgtttttttagattaatagaattgtgtgtggaggggaggtagttgggggttatatattagtttttttttttaaagtcggtgaaaggtgtttgtgattttggtgtttttgtagttttgggaagttttaaaaatatgtaaaagttagatttgggttttatttttagttttattagattttagttatgtgattgtgggtaagttagttattggagttgtttggttttcggttttttggtttgtagaatagggatgttaatagggtttggtttatttttacgatttcgaagaggagataggttataaataggaggtgttaatttagtacgttatttggtatgtagtaagcgtttaataatagtttttattattatgttcggtttagaggtagggaggagtggaacggtatgggagggttgcgggaggtacggtaggggggttaggggtaagtggtaggagggcggatggggggtagcggtgggtatcggggtagggcgcgttgatttgttttggggttcgggttgggggtagaaatgagtttgtttacgttgtttcgttacggtaggcgttacgtattttcgatatagtcgttatggtaggttttcgggtttcgttttcgggataggcggtgtagggtaaattggtatgtagcgttcgtttcgtgggttcgggagagtttgtttcgtagggattagagtttaaggacgggtttaatatttagttaaggtggggttgacgacggttagataataggggagggaggagggataagggggtttttatttttagggacgtataatagtagagttatttatacgttggggagggggcggtgcgggggtttttttttcgttcgggatttagagtcgggggtgggggttagtcgggcgggtgagatgcgtagagaggaagggatagggcggataaaggtacgaggtggggtttcggttaggttaggaagggatatgggaggggtttcgagggggaggggttgggttttttttaattttttttttttttttttcgggttgggggtttcggggcgggattttgagcgtagttttggtttcgcggcgtttttcgtcgggtcggttttttgagatttcggcgtagggtcggttagggggcgtcgcgttttttatattaacgcgtagtcgaattgttcgcgttcgagcgtttttttgtggtcggtttaggacgaggcgggtatgcggttgtaggggtcgagtaggatgcgtacgtagcgtattattaatagtattagtattacgagtaggtagagtacgaaggcgaatatcgtgcgttgtttcgcgtttaggttcgcgtttatcgggggtttcgtcgacggcggtaggggtttcggcgatagcgtttacgtcgcgtttatggtttatatcgtcgcgcgttttgcggaggaggggattcgtttcgggcgtcggggatgaggttgcgttttttttttcgcgtttttttcgtttcgtttttttttgtcgtcgtcgtcgtcgttttttttaacgtgttcgattttatttttcgttcgcgtttcggttttcgggttacgtttatgttcggttcgtcggatcgtcgttattattacgcggggatttaattttggtcgtgcgcgtaggtgggggcgttgagagtcgggaaacggagtcgcgttcggtttgggtcgtatataataggtgcgaaagcgcggtcgcggttcgggcgcgcggcgtggggacggttttcgcggtttttgttttcgttttttttgttttcggcggtttgggatttttttttttatcgttttcgtttcggcgcgttttttattttggtttcgattcggacggggatcgatcgttcggcggtcgcgtttttttagggattcgcgtcggttgcgcgttcggttttttttcggcggcggcggcggcggttcgggtttcggtttagtttattttattcgtttttggagcggcggagatcgaggtaggtaagtagcgcgcgagtcgggtcgtcgcggttgtttttatggcgacgggggcggggtcgtcgcggggggcggggttgtagggggcggaggttgcgtagggagcggcgcgcgagttagcgatttcgttcgggtttgcgggaggacggaattttagtttcgaggattcgcgagtatttacgatttcgtcggggagtgggtagttgttatttttattttttttggtatttcgggttttttagtttgttttgtgtttgtattttttttcgcgatagattttattcgagattttttgtttgtggggggattttagtggttttaaaatatttatatgggtatttaagttttttcggttttggggattttaatttttagagagtttaggtaggttattgggatgagtaagtttttttagttttgtttgttattggtttcgttttttaatttagggtttagttttgggtaaggcgtttatttattgcggttgtagttttttattcgattttgatcgttttttatagtagtcgtttgtttttatttttattatcgtttcggttattttcgcgttagagaagatattttagatttcgtagttgtttttttgtaattcggtgttttattttttttaaattttaggtttatgtataagatggaagagtattgttaaaattaaaaaatggatttaaagtggtttggttgacgtggttagcgggttattgagtcgcgggtttcgggttttattttgttgtggggggagtttttgggttttggggttttttggtattgtgtgatttgtgtgtattttaggtgattaggcgtcgggatttttgtagggtagagtaatagggtaggggttggttttgcgggggagtgtttttagttgtcgcgtattcgtaatagttcgttgttttttttcgggttagttggttttgtagtcgttttggtagagttgggggtagagttcgtagttttgtttttagaggtttggagttgtcgtaggtggtgttgcggtgtttttgtgtttgatgatttaggtcggggttatttggtttcggtattatatttagagaatttgttcggtgttggaggtcgagatgtttaggagtcgttaggtcgcgtaggggttgagttcgttttggtttcggtagagcgtttatacgtatagtattcgtagtattttgttttgtagggtggggtgggaagggtattgttgagagggttgaggtgatttaggtagttttgggggggggttaggttttgtggggtaggagttatcggtaatttttttaggggttgggagtagaggttagtataattgtttagatttaggaattatttagttttggtaaaaatagataggtttgttggttttcgattttttttaattttaaattttggtttagaggtttttttatatttttatttagttttagagttttagggttttgagttggggtttttgttaggtggttatatatagattttggggataggcggtgttatgtgtttgttttattttatttttttatttatcgggttattttttattatttcgtttttggggtttttgattattattattagttgtgtttggaaggtgatgattagtatcggtttttgttttattattttgtttatggttagttgtagaggggtcgagaggggggatgtgttttagaggatagttcggttgtttttttggaggtgaaatttttgcgtttaggttttgttaggagaaggttttagtattaggtttagtatcggttttttttcgtgggttttgttttttaggttaggattaggtttttttcgagattttttttttggataagtttaagattttttggattagtttatggtttttagtttttggtaaggttattttttgggttttgtttgggttatagtttttattttcgatggtggttcgggtttttattgcgaggtgtttacgtcgacgttgttaatgtttaggatgcgagaatggaattggagatttagtgttttggtttgttggatggggtgggttagttggttgtaagtttgtaatgagaggtcgatacgtttgcgtgatgttatttagggtgggtattacgttatatagagttgttgtttatatattttggcgtttaggtgttttgtcgttagttagtaatggtagaggttaagaatttaggtttaagtggggaggtaggtgttatttatttattggtttagattatacgttttttatttttgggaataatattttatttagatgatttaatgaaaataggattaattagtaaagtgggtgatttttttggaataaaattttaaatttatttttagggttaagttggcggttttttggttgatttttaatatttttatattcgtcgtattttgaattttggtttgagattaaacgttttttttaggatttgtttttagtttgaggttgtttttgttattgattagtttttagtg

SEQ ID NO: 176 - DNA, 22355 bp, Artificial Sequence
  chemically treated genomic DNA (Homo sapiens)
tattgggggttggttagtgatagaggtagttttaggttgaggatagattttagaagaggcgtttgattttaggttaagatttagagtgcggcgaatatggaagtattaaagattagttaaggggtcgttagtttagttttgggagtagatttgggattttgttttaagagaattatttattttgttgattaattttgtttttattgggttatttggatagagtgttgtttttaggagtgggaagcgtgtgatttgggttagtaagtgggtggtatttgtttttttatttggatttgggtttttggtttttgttattgttggttggcggtagggtatttgggcgttagggtgtgtgggtagtagttttgtgtggcgtggtgtttattttgggtggtattacgtaggcgtgtcggttttttattgtagatttatagttagttggtttattttatttagtaggttaaggtattgggtttttagttttattttcgtattttagatattgataacgtcgacgtaagtatttcgtagtgggggttcgggttattatcgggggtgggaattatggtttagataaggtttaggaggtggttttgttaggggttgggggttatgggttgatttaagaggttttgggtttgtttaaggggagggtttcgagggaggtttggttttggtttgagaggtaaggtttacggggagggatcggtgttgggtttggtgttggagtttttttttagtagggtttaggcgtaggggttttatttttaggggagtagtcgggttgttttttgaggtatattttttttttcggtttttttgtagttggttatgggtaagatgatggagtaggggtcggtgttgattattattttttaggtatagttggtgatggtggttaggaattttaaaggcgaggtggtggagggtgattcggtgagtgagggagtgggatggggtaggtatatgatatcgtttgtttttaagatttgtgtgtggttatttggtagagattttagtttagagttttgaagttttgggattgggtggggatgtggagaaatttttgggttagagtttggggttgagggaggtcggagattagtagatttgtttgtttttattaaggttgagtggtttttgagtttaggtaattgtgttggtttttgtttttagtttttggggaagttgtcggtggtttttgttttatagagtttggtttttttttagagttgtttgggttattttaatttttttaatagtgttttttttattttattttgtaggataaggtgttgcggatgttgtacgtgtgggcgttttgtcgagattaggacgagtttaatttttacgcggtttggcggtttttggatatttcggtttttagtatcgagtagattttttgagtgtggtgtcggagttaggtagtttcggtttgggttattaggtatagaggtatcgtaatattatttgcggtaattttagatttttgggaataagattgcgggttttgtttttagttttgttaggacggttgtaagattagttggttcgggaggggataacgggttgttgcgggtgcgcggtagttggagatattttttcgtagggttaatttttgttttgttgttttgttttgtaggggtttcggcgtttggttatttggggtgtatataggttatatagtgttaagaggttttagggtttagggattttttttatagtagggtgggattcgggattcgcggtttagtggttcgttagttacgttagttaagttattttaggtttattttttaattttaatagtgtttttttattttgtgtataagtttgagatttggaaagaataaaatatcgaattgtagaagagtagttacggagtttgaagtgttttttttggcgcgggagtggtcgaggcgatggtgggggtgggagtaggcggttgttgtgggaggcggttaaggtcgagtgaggaattgtagtcgtagtgggtggacgttttgtttagggttggattttgagttggaagacgaggttagtgatagataaaattagggggatttatttattttagtgatttgtttgagttttttgagaattgaggtttttagggtcgggggagtttgagtgtttatatgagtgttttagggttattgaggtttttttataaatagggagtttcgagtggggtttatcgcggaggagaatgtaggtatagggtaggttggggggttcgaagtgttaggggaggtgggagtggtagttgtttatttttcggcgaggtcgtgggtgttcgcgggttttcggggttggggtttcgttttttcgtaggttcgggcggggtcgttggttcgcgcgtcgttttttgcgtagttttcgttttttgtagtttcgtttttcgcggcggtttcgttttcgtcgttataggaatagtcgcggcggttcggttcgcgcgttgtttgtttgtttcggttttcgtcgttttaggggcgggtggggtgggttgagtcggagttcgggtcgtcgtcgtcgtcgtcggggagaggtcgaacgcgtagtcggcgcgggtttttgagagagcgcggtcgtcgggcggtcggttttcgttcgggtcgaagttagggtgaggggcgcgtcggggcgggggcggtgggggagggggttttaggtcgtcgagaataaagggagcgggggtaggggtcgcggggatcgtttttacgtcgcgcgttcgggtcgcggtcgcgttttcgtatttgttgtgtgcggtttaggtcgggcgcggtttcgtttttcggtttttagcgtttttatttgcgcgtacggttagagttgggttttcgcgtggtggtggcggcgattcggcgggtcgggtatgggcgtagttcggggatcgaggcgcgggcgggggatggggtcgggtacgttaagggaggcggcggcggcggcggtaggagggggcgaagcggaggaggcgcgggagggagggcgtagttttattttcggcgttcggggcgggttttttttttcgtagggcgcgcggcgatgtgagttatgagcgcgacgtggacgttgtcgtcggagtttttgtcgtcgtcgacggggttttcggtgggcgcgggtttggacgcggagtagcgtacggtgttcgttttcgtgttttgtttgttcgtggtgttggtgttgttgatggtgcgttgcgtgcgtattttgttcgatttttatagtcgtatgttcgtttcgttttggatcgattataaggaggcgttcgagcgcgggtagttcgattacgcgttggtgtgaggggcgcggcgttttttagtcggttttgcgtcggggttttagagggtcggttcggcggggggcgtcgcggggttaggattgcgtttaggatttcgtttcggagtttttagttcgggggagagggggagggagttgggagaagtttagtttttttttttcgagattttttttatgtttttttttggtttggtcggagttttatttcgtgtttttattcgttttgtttttttttttttgcgtattttattcgttcggttggtttttattttcgattttgaatttcgggcgggaggaggattttcgtatcgttttttttttagcgtgtaagtggttttgttattgtgcgtttttggaagtggggatttttttgtttttttttttttttttgttgtttggtcgtcgttaattttattttgattgagtgttgagttcgtttttgggttttggtttttgcggggtaggttttttcgggtttacggggcggacgttgtatattaatttgttttgtatcgtttgtttcggagacggagttcgaaggtttgttatggcggttgtgtcgaggatgcgtggcgtttgtcgtggcgggatagcgtgggtaggtttatttttgtttttaattcgggttttaggataggttagcgcgttttgtttcggtgtttatcgttgttttttattcgtttttttgttatttgtttttgatttttttgtcgtgtttttcgtagtttttttatgtcgttttatttttttttgtttttgagtcgaatatgataataaaagttattattgagcgtttattgtatgttaagtagcgtgttgagttggtattttttgtttatagtttgtttttttttcgggatcgtgagaatgagttaggttttgttagtatttttattttataggttaggagatcgagggttaggtagttttagtgattgatttgtttatagttatatggttagagtttggtagggttggaagtggaatttaggtttggtttttgtatgtttttaaagttttttagggttgtaaagatattaagattataagtattttttatcggttttgggggggggggttgatgtgtaatttttagttgttttttttttatatataattttgttgatttggggaggcgtcgggggtggtgagagagatttagttttgtggggaattgggaggcgtattttttgttagttttggagggaggtttcgacgatcgatcgtatttgtagtttaagttttttttttttgtttattattattggtagcgtttgtgggtttggtgcggtggggcggtgattacggacggagtgggttggttgtgttttaaggtttttttaagagatgtgtattttaggggagtcgtgtgtagtgtgtggggggaggaatgagcgtttttataaaaggtaggttgggtgaatgtataggtttcgagaacggagaatttatcgatttggattattagttgggcgtgggacgcggtgtcgtgggaggatatttgtttttttttttaggattcgattttcggtttatatttatagggtaggtgaagttgatggagggggttttaagcggggttttagtatttttaggggtttggggttagttttgattttagtattttttttttttcgttttttagggatttttgaggttttaaagttattttaggggatattttatttttattagttttttgttattcggggtagtttatttttatttatttttttttaatcgtttagtttggggtttaattttttttatcgggttatttttattttttgttgtttttttttttttatttgtgcgatgtgattttgttttattttgaaatttatttttgacgtttgtttttaaggtgttttgtcggttttttttatttatatttgttagttttatagttattaaggggttttttattttaggttttattatattagttaggtggtagtttttttttttggtatatatttttagttttgtgatttttaagttttgatattttagggtttttatttttatttttaagttataggtgaaagagaaagagaatgataattttatttatggttatagaatattttcgggaaggggaaggatttggtagtagggagtaattacgattggttagttgaagaaggtgaggatgttggtttcgaggtgtataggaagggggaaaatgtgcgagggtttttacggtgggtagtgttagttatggttttttagtagataataaggtatagtggggtttggggattgggggaggttagttttgttcgtttgtttttgatattaggaggtttgtgagtggagttttgtaatttttatttaatttttgtataacgggggttttatttttgagatttttaaagtatggggtattttagaggttcgttttatagttgagtattattttaaggatttttttttatgacgggatttttagaaagagttagggttagtcgagtagaatcgaggggtagggcggggggtttggtgtggttttttgttcgttatgttttttatttggtaggggtggttgttcgatttagaagttttaggggtattaggaacgggtttaggggatagattttagttgtttgttaaggcgattttagttcgttgtgttcggttttttcggtggttgggggggttttttttggtgttttggagttagttttatttttttttgttgtaggttttaggttttttttagcgggaatgggttggggggttgttaggcgtaggtacgttttcgttatatgtttaattagggttgtgtagggtaggagtggtagtttttttggaagtgatatgagtaggtcgaggattatagcggattttagtgatggatggaggagaggggtaaggggatatttttgtttgttgttagggatttttgatttttttgtttttgtttttttttttattttttttattagttgttgagagttcggggttgcggttatttcgggagatagaggataagtatttgtagatttttttaaagtttatagtaaagttttttttagtggagggattagtcgacgatttagaaggttttttaggggtagggttaggagttttgggtgcggagttaggtgtagtaggggtagagttaggtattttaggggcggggtttttttgttttttaggggcgtttaggagtaaaggttttttacgggtttgcgtgggtttggggggtttggagtgtaggagggtgatcggtttcgtggtcgcgatggtgagtatttggtaggtagaataattagggaggaagaggagttgggaagtttttttatcgtttatatatttttttattttttttgttattttaagatgttttttagataagagatggttttagagttagggatattgaggttcgaggtgtttagtgattgacggagtttatagagttggtaaaagggtttaggatttaggtttatatgatttggtttatgtgattttgttttttgggatattttgatttgtttgggggaatggcggtatttgcgagaaagttattgttagggttttttttagtggttttgttatttttttagttagattcgtttagatttgagtgaagttagaggtatagggttagtttagggattagtttgtaatggttttttaagttttgttttttttggggattttttaattaggttatttttcgtaatttttatttatttattagggatttgttttggatagttttattttgtttatttgttttatttttatgggggttgggggttgtgtttttcggcgttttggtttttgaaggttattcggatgtattttttgaatggtttttcgggttacgcggtttttgagttgttggaggaagattcggatttagaaaggaaagaggcggcggaatgaggtttttatgagtttagggttgtagtagagaagttaaagtttaattttttgtatgttttgggtttcgttattgcgttttagttttttgttggttcggtgttaggagttttagtgattgttaaggtttttattttatttagagcgtgattagttatttaaggaagttgtaaggtttaggttagtttcggtttttttacgtagttagggtttaattttatgttgattattatttcgtttaattttttttttcgtttttttttttttatttttttttattttaagttcgtattttgtttaatagtatgcgttgtttttcgttcggattcggtagtattttatttttagtttatttcgttcgtttagttttcgttttatttacgtattatttcgaggttcgtttcgtttttaaagtttgtttttatttcgtttacgttttttttacgttttatttttaaaacggtttcgtttttaagttttgttattaattcgtttacgtttcgtttttaggttcgttttgttttttaaatttatttatttattttttaaattttagcggtacgtacgtttcgttttcggtatcgtttcgttttttcgttttatttatgtttcgtttacgtttagtttttaagttcgtttcgtttttaggtttttttttttcgtttacgtttcgttttttatttcgtttaggtttatttattaacgtttcgttatttagttttacgttacgttttcgttcgtttatatttttggtttcgtttcgttggtttttgtcgtagtttcgtttatttttcgttttattttagtttcgtttttagtttggtttcggtttcgagaatcgtattttattttagtttcgtttcggtttcgtagttttcgggttagttcggtggcgttcggtttcggttggttttgtcgcgtttgtaggagtcgtattagttgtcgtttttcgcgagcgttttaggtcgcgggatcggttatttcgtttagatagcgcgtcggggtcgttcgtcgtttgggaggtggttttatgtcgtttagaaagaggtaggcgttgtaaggtcgttttttcgatgggcggagttacgggggtcgtcgaggttagaaagaatcgcgcggaggcggacgcgcgtgggggcgtggtttcgcgtttggaggttcggggaatcgttttaatggaagtgaaggggagatcggtatcggaattggggcggggcgaaggagatttttagtttgtattttattttatttatgaagtggagacgatattttggattttatgttttttttttgttgttggattaatttatgaagttattattgtgtgttttgtttttcgtagaggggtgggttttggtcgaaaggttaagttcgaagatttagtcggttaagagtttgggttttggggttagataggtttggggattttgggtaagtgatttagttttgtcgagttttagtttttttttttgtagattggggttgatagttttatttttgtttgtgtaaggtagagtggagttcgggtaggagggatttaaggagttttagattagattgataatttaagaggagggcgaagtttagattaggagggaattggagtagaggtagaaggtcgaagcggagttagggtagggttcgggcgggggtaatggagagcggagaaggtttggtttgagaaagatcgtaggaggtagatgggtaggtgttcgggtaaggagaggagggagggggaaggtttattttaaatttacgtttgtggggttgggtgtcgttttttttttttttttagatagatttttgtttttgttgtttaggttgtagtgtaatggcgcgatttcggtttattgtaatttttgttttttgggtttaagcgatttttttgttttagtttttttagtagttgggattataagtacgcgttattacgttttgttaattttttttttgttattttttttagtagggacggggttttattatgtcggttacgttggtttggaatttttgattttaagtgatttatttatttcggttttttaatgtgttgggattataggcgggagttatcgcgttcggtcgggtgtcgttttttgtttgagataaaacgttttatagttttttatggtttgggagtgtatacgggtatatgggtatatgggtttcgtttttaggttttatttttgtaagttacgattttttaggaatattttttaagttttgtttttagttttttttttaagtttttttatttattttttatttcgtacgttgcgcgtttattgattgtattagaatttagtcggttagtttagaggtttattttgagtataggtgggagggatagggggaggagagaagcgtaggggtcgtggttttattaggttcgaggtttagggaggcgggttcggttttgttggttttggtttcgaattggtagttgggtgtattttcggattatgttgggggcgtattatttttgggaggggtggttgaggtttagcgagggaggggacgttacgcgggttatttttttttttagtagattattagttttttttatcggtttgtatgtcggggtgagagtgggagtcgggttcgaatgttgagtttttttcgtttagtgtttttttttatttaatgtttttggttcgatttaaagttcgcgtttgtcgcgggtgatttattgtttgagttcgaatttaagttttatttagtattgtgatttttgataagttatttaatttagagaatgttttattattttcgtttttaaaatggggattataatagtgttcgtttagaggttaaggggattaagttagtttataggcgtaaaatatttataatagtgtttggaggttgggcgtagtggtttacgtttgtaattttagtattttgggagatcgaagcggtaggattatttgaggtcgggtgtgcgagattagtttgattaatatggagaaatttcgtttttattaaaaatataaaattagtcgggtgtggtggcgtatgtttgtaattttagttatttaggaggttgaggtaggagaatcgtttgaattcgggaggtagaggttgcggtgagtcgagatcgcgttattgtattttcgtttgggtaataagagcgaaatttcgttttaaaaaataaataaataaataaataaataaataaaaaaattatagtgtttggtacgaattaagcgttaggaagcgttattgttagattttttattttatttagttttttttatttttatatttattttttttattgggattttttgggttggggatcgttgggcgaggttttcgcgggcgggttaggggcgtggggcgttggaagggagaggcgagttgtagaagggttgttgcgcgttacgttaggttaagggcggtttttgggggttgttgcgggtatcgcggaggtaggtttagttagggttgattaggtttcgtaggcgggatcgcggtcgtttcgggtttcgacgcgcgggattagattgggggttcggtttggcggaggtcgtcggtatttgagtgcgtatagacgagatttagttcggcggttagcgcggcgtttagtacgaaggttgttaatattagcgttattatcggcgcgggttttagggtcgcgggggtcggcgcgggaggtttagggcgtattgtacggtcggggatatttttgggcggttttgtgggaagtgttacgttgagattgggtttagtttttaggcgttttttttattcgttttgtcgttttacggttttatgcggaggaggattgcgtgtttattggggggcggtcgcggtacggtgattacgataggttgcgttagcgtgtgtaggtgggggtcgttagtagttaggttttcggcgttgttattgttagtgtcggcgtacgtttcgttttgaggtagatattgggggagaggaaggtggggaagagacggggatattagggtatcgggatcgtggttttggtttttagggtttttaagagagatttgagtttagttttttattatagttaagatgggatttttggaaattcggttttttagggtgttttgagtttagtttttacgtatataagtggttagtcgtttagtttttaaggattttaaattttagttttataagatcgtatggttcgcgttttttagtatttagtatgtgaggtttagtattaggtttttagaaatgtgtttttttagtggttttttgtatttaatttttagttttgaaggattttagagttgtttatgggggaatttagtgtttatattgttttcggagaaattttgtcggtagagatggatttttgcgttttattttttttaatttttagatttttagatttcgagagtattttttttttattgttagagtcgttcgtgtttagttttcgaagggttttagcgttcggattttaggttttgcgttcgcgtattcgcgatggcggcggcggcggcggcggcgttagaggcgtaggcgttcggcggatttttcggaggcggcggtagcggtttagttggtagtgtaggaattgtatcgaggcgttgaagatcgggcgtaggcggaagttgaaacgcgcggggcgggcggtattcgggttcggcggcggcggtggcgggaaggcgatagaggtgtcggcggggtagtttttacgtagtagagttagggcgggtttcggggtcgggcgtgaggacggcgttattgagtagcggtgtagggttaggttttagcgcggggagggacgggttaaggtcgtttgggggacggaggcgttattagggatcgttcgtttttatcggtttttattcgtttttggtgttttcggggtttttatttgtacgaatacgcggttgtcggtcgggatttcgagcggtttcgcgcggcgaggaaagacgttttttgtgtcggatagttttaggttgaagaggggtttgcgtagttaggggtcgggcgtcgcggggaacgggggagttggcggggcggggaagggcggtttaaaggagagaaaacgcgcgttgttttttaggttttcgggaaaagtgattcgattatttcgttttcgtcgtcgtttttggaaaagggatgcggttgcggcggtcgatttatttatgatgggtttcgcgttatttttttttttgacggtgatgtgttttttggcgatttttgggattcgtatagtttagtaattgagtcggttgtagagttatgcgtttttagagaagttttcgaagttggcgaagttttttttggggcggaagagaagcggtgaggagtattcgatggtggggttcggttgggtgaagttagagtttttttattttttttagggttgtttttggggacgtagtaggataggcggtttttttttttaaggggagataggtgttgttattaacgaggaagggaagtgaagaggatatttttttaagaggtttttttgggtatagttaaagtttagttaggttattaagatttgagacgtttttatttgtttaggttgaggtagttatgggatttttttttttttcgtgtttttaaatatacgttgatgtttgtttttaggtgttgagcggggttttggtaaaacggttaatttttaaatacgaaagattgtttgtatatttattttttttgttttttgagatagggtttttttttgtcgtttaggttggagtgtagtggtgcgaatatagtttattgtagtttttattttttgggttttagttatttttttgttttagtttttcgagtagttatgattatagttattcgttattacggttatacggggtttatgttgtttaggttggtttggaatttttggttttaagcgatttttttattttagttttttttaagtgttgggattataggtatgagtttttttgtttattcgtatattatatttatttttgaagagtatttgggtagattggtttttttttataattttggtttttttcgtggttgtagggagttttgtcgaagtggggatgtgagttatttttgggatgggggatagagattttattttatttttttgttttgtttttatttttatgaggattattattaaaggtttagttgaaagagagtgatatcggtggggcgcggtggtttatatttgtaattttagtattttgaaaagttcgaggcgggcggatcgtttgaggttaggagttcgagattagtttggttaatatggggaaacgttgtttttattaaaaatataataattagttaggcgtggtggtgcgtgtttgtagttttagttatttaggaggttgaggtaggagaattatttgaatcggggaggcggaggttgcggtgagtggagattgcgttattgtattttagtttgcgtggtagagtaagattttattttaaaaaaaataaagagggtgaaatagggatagaagtatgatagattcgttatttttttgtttatatatattaggtggttcgttgggtaaggtggtgatttttgggagtagggttagtagtagtacggtgtttagtatgttggattagttgaggtcggagtgtttggggttagagtagatattagttgggttgtatttaggtttcgtacgtgggtaggcggttttgtttttggtaaggagggaggtagggagcgggggtggtagattgaggggttgatattagagttaatgtttaaggtttgaggggattaagggattttttgttgttcgatttgtggttattgggggtagggggttttttatattagttgtttgatatttatcggtaagttattataaatatttttcgtttagtttttaaatttgttttagtttttttttaatgtagaaattttttttcgtaattattttttttttatttcgttttgttaggtttatgatatattatagattcggtggaagaaaaggaaggggtttatttttaagcgtttaagggtttataaacgagggtattttgttttaaaaaggggtagggcgatattggcggtttgaggaggggtttattggttggtgggttggttcgagttatttttaggtttttgtttattcggttcgttttttgtttggtttagagggatggttggtgacgaggggggaggttttgggagaggttgggaggtaggagagatttttttagggttttttatttaatattgaagggggtgggggtgggcggatatatatttataaaatagaaaataaagttaaataaaaataaaattaggtagttcggtttcgggtttgtgttggttttgggattagttatgtaatttttcggtaatcgtagaggtttttatggttggatgtaggggaggaaagggttaggtttgttggtatttttattcggtagatttttggtttttgataaaggggttaaggggtaagagaaggtggtttttttttttgggggtagagagaagatgatatttatgattttttaaatatgcggcgttttgtgaatattatgataataataagagttaataggttaagtgagaggagagggatgttacgtttacgttgtttttattacggttagtcggtttttgcgtttttggtgttggattttttttgtgattttacggggttttgtgtttttttttttttgttttttgttttgttatttttttttgtttatttgatttgtatgtaatatttataaaaaggaaatatatttttttttgttttggttattttagtaggtttcggggggtatttggtttgggttttcggtgtatttattcggttttttttagttttggattttaacgtggattgggttaggtgtgggtgagtggagggacggttaggggtacgatgggagtgattatttcgtatttttatttttagttcggtttttatttttgttggagtttgttatacgtttttaaatttttatatttattttttttgttttttatttttgatttttttcggattttttttttggtttcgtttcgttatcgatttttttcggttatttgttttgtattatgttttaagattattttttttgaaggttattttgtgcggttagggtttcgtagatttttttatattttttgaggtttttaatttattttaagttgtggttttcggagattttagagtagtagttttagtttagttttttagtgttcgagggcggttggggttttattataagtagttaatcgtgattttggtaaaagtttttgaaggtatcgataattttacgagaataagttttttttcgtttttattttaaatattttattaagtataataaaatataataaattttaaaaaggattttttgagattaaagagagagagagagagagagagagagcgcgagcgcgtagtttcgtttagtcgtagtggtaatgtttatattgtttggttgggggttattgatttattgcgttatgggagatttatgtagatttaggggattcgttaggaggtggttgggtttaggtttaggttagaagagagatagaggtagggagggtgacgggagagttagataaggatagagaggtagagtaggggatagagggcgacggaagaggaacgggcgcgtgggagtggcgaaggatatagtacgttgggagcgtgtatggtggttgcgggattttagggtttttttttggtttttgggggtcgtttcggtttagaggttgcggttgaatgaatagcgattttgatcgcggtttgttgtttttcgtttatagtgtttgtcgggggacgtatacggtcggttgatttcggggtgggaagggcgggggtttggtaggttcggggcggggggggtgggtgggtattttttattttttgtttttagttttaggtggtcgtttaggttttaggttttttttggtaggtagttgggtggttaagtggggaggggggtttgtggttatgtttttggttttttgtggggttggtcgtcgttaagtagttatttgaagaagggtaggtggggttggtttaggacgtcgttagttcgcggtgatttagttttcgttatgatatttttgaattaggacgttacgtttatttttagcgtttcgtagcgtttgatgaagttgtgtttttgtgggttcgagggggtggggtttaggaggagacggtttttttttttggtttcgcgttttcgtagggataggacggggattgggagggtttaggtatttataagtagtttattatattttggtttttttttgtgatttttagtaaggttagagtaagagaagggaagatagatgtgagaacgagggaggaggggatgtcggttttatttttgtgtttaggttttttttaaggggttaggggtttttaagatgtgtgtgggggaaggagttgtggatgtttttaggatttcggttgatagcggggagtaattgtgagtttcggagttttttggtttagggttaggtggtaagggtttggtttggggggttagagttggttgaggttttttagaaaggtgggtggggtttttttgagagaatcgaatatggtttttttgaatttgtagttgtgtttgttgtagaagcgtgtttataatttttaatagttatttcgttaaatgttatagggttggttgtttttttaggttaggtttaaatttagtttatggttttttgggtattagttttagtttttgtggtagtcgttagttaggagttcgtttatagtcgtattcgtttattttagggtgcggtttttattttttttttgttattgtttttttagttgtttagagtagcgggttgtttttgattttttaagtggagggaggtttttattagtttttgacgaaggattggaagtttttcgagaagtttatgtgttcgggtagaagcgggggttttttttgtaggattttggtgaggattttaaagttcgttttgtagtttttgtagggaaattgttttgttgttagttttatttgggagggagacgggtagggttggataggtttatgttttttttttttcgagttttttagaagtttttatttttggttggagaataggggagggttttaatttattaacgagatgtttaggttttatacgtcggttcggatgttatagttcggtttggtggggtttggggggttaatgcgttcgggttgtaggggggggaggagaagacgtatttttaaggttggggtcggttttttagtttttattttttttttcgttggggggtttttatttattgttatgtaggcggtatagtcggcgtttcgcgttttggttttggagtttattaggcggtcgttgatgtcgaagtcgtagagtttgatttggtttcgttcgtttagtaggatgttggagggtttgacgtcgcggtggatgatatcgtgttttttttttaggtagtatagcgtttttataatttgtaggtacgtagaggggggtgtatgtggtagggggtatagatttaaggttatttgttcggtgtacgttttatttggttatttatcgttattgttattttgtttagtgtacgtttcgtttggttatttatcgtttttgttattttgtttagtgtaagtttcgtttggttatttatcgttattgttattttgtttagaatgcgttcggggatggggttttgtattcgttttttgagttttttagcgtaggtgtttatgagttttatggcgatgaagacgttcgtttgtagggagaggggtattcgggggagttgtgtttttcggtttattttttagaggttttgttttttaggaaggggtaggggtgagggaggaggagacgttgtagggcgcggttaggtatttacgttggtgatgaacgttttaaagtattgtacgatgtaggggtagtcgtggttttttagtattatatttaggtttatgaggatgcgtttgtttttttttttgttttcggagcgtcgtatttgttgtataggtagggataggagggagttttagtatcggtttggggtgtggggcgtagtcggggtagtcgttaaggtttattttaacggtaatgacgtggtcggtttttcggaagcgtattttttatatttggtcgtaggtgtcgttgtttatttcgtttaagttttttaggtcgttgatttttgtttggtagcgttgggaggagagggagggttggagggtttttggggtttttgttatcgttttttgttttttattggcgtttttaggatgggtttagtttggttgggtttttttttttttttcgttatagtgaaggtggtatttggttttcgatggttaggtagttcgtttgttttatgattttttgtagtttttggttaattttaatgttggggatatggagtaggtgtcggtggaggtgggttttgattttaggttggttattttagttttttatatcggggtttttatcggtttaattattttttttttagggttggtacggtggttttttaatgttgttttttatttaattttgttgggtttttggtttatttttttatgttgcggggtgtgaatagggttgacgggagttttagtatgtggcggggtcgggcggggggcgtggggtgttgcggggagttttttgaggatggcgagcggttgtttttatcgttggttagcgggagttgtagggttaggggggtgagaattagtggtagggaggggggttagcgtttagttggtgttagttttatatttggtattttagggaggggtcgggatttttattttttttttttgggtttttcgagttaggttggtatagttttttgttttgttgggttggaggagttggggttttttttttattttagattgtttttagggttttttgttttattttttgatttggaaagagatggaggaggttagtaggggagagggagttttaagtttacgttgacggagaaacgagatggggatttgaggtgtttttcggttagggggtttttttgataggtgtgtgtatttttttttatttttgtttaggaagtaggtttagggttatagtatttataggatggataggttagggcggagtgtttgttagggttggtttaggttgtggttttgttggtagtattgaagttggtttttagataagagcgagtagggttacgttggggaggtagcgggtacgagatttaggttttaggttgttttgttttattttttgtttcggggttagggagggtttttttcgggttagtgggttgatatgagggttttttggtttggtttgtagagttggggtttatgggggtaggataggattttagggggtttgtattttttgggaggagagttcgggggtatagtttttgtaggggttggcgggattaggtggggttaatgttgggttaggcgggggttggtttatttagtagtttgtatgcgggtagttcgggtatgttatagcgggtgggtaggcggcgggtaggtagtaggtattttggggtgggtaggcggtattaggggtgggagggtaggagatagatagatagataggaattaagattagggtttaggtgtttagaggaggcgttgtagagataggttagagaggggtttgggataggagggtagtttttcggaggagttagggtttttttggttgggttggtaatagggtgtaggaatagaggtcgggatgttaacgtggtttttagaggagttaattttgatacgttatattttagaggttttgataacggttatatatatttattaaggtgttttttttataggagttggggtttgtcgttttttaaagtttttagttaataagtttttttttttttttttttttttgtttcgtttattttttttttttatagttttgtaggtttttggtgattggtgtttagggattaatatgaatagataaattcgttttatgttggtagttaaatttcgtttttttcgtgtgtttaggattttgattttagttagtaggaggggtaggaagacgttttagttttaatgtaggaggtttagtattgtttttatttggttttgttagtttttgtaggagttgtgttttttagttttttttttggaggattaggtaggagtaggggaagggttttggggattttgggatatagttaggtttagcgtttatgattggtttagaggttttatttttcgtgtttttttcgttgttttggttattgtcgtttttgtagtattacgttattttttattgtttttttttttttttgagataggttttcgttttgttatttaggttggagtgtagtggcgtgattttaatttattgtaatattttttttttaggtttaagtgatttttttgttttagttttttgagtagttgggattataggtatacgttattatatttagttaatttttgttttttgagtagagatggggtttcgttatgttggttaggtttttttttttgtttttttaggtttttgcgtttttgttttgtttatggtttgagttatagttttagtttttttttggttttcgagggtttgtgttttttttaatttagtttttaatttttgtgtatttggtattttttgagatattgtttagttttcgtttttagagagtattcgagtttcgtttatattttgtatttagcggttgacgattatagttttcgaggagttttgtgggttttttttttgatagagtttattaggtttttcgagggtggtttcggagtttggggaggaggttgtcggattatagattggagtatggggggatggaagggagggtttaggtaggtattgggggaaggaggtatataaaggttttgagaatagaggttatagaggtggtgatggttatatggtagtttaggagggtggagtgagagtaagagggtgaggatgagaaagagaacggatgagagagagcgagaggttggagggtacgtgtttgtcgataggagttataggtgtatcggttgttatgttaatatgtacgtatatgtcgtgtaagtgtacgtacgtataatatatattcggggtatgtcgtggatttaatatttatgtagtcgggatagagttttttttgttttcggatatatatatttataattatttatagggttaggtattttatttatttttttttttaatataggcgtggggtatagtttgtatgttttatataggttggcgttgcgtttagagttttggcggttttgttttttttttttttttaatttttttaagacgttttttaaattttttttttttttgagacggagttttgttttgttgtttaggttggaatgtagtggcgcgattttagtttattgtaatttttatttaattttttatgttttttttttttttgagatggagttttgtttttgttgtttaggttgaagtgtaatggtgcgattttagtttattgtaattttcgtttttcgggtttaagcggtttttttgttttagtttttcgagtagttaggattatagtttttcgagtagttgggattataggtatgtgttattatgttcggttaattttgtatttttagtggagacggggtttttttatgttggttagggtggtttcgaattttcgattttaggtgagttattcgtttcggttttttaaagtgttggaattataggtgtgagttattgtgtttggtttaatttttagtatttttaatgtagatagggttttattatgttggttaggttggtttcgaatttttgattttaagtgatttattttttttggttttttaaagtattgaaattataggtatgagttattgcgtttggtttagtttttaaatttttgagataggatttcgttgttatttaggttggggtgtagtggtgtgattatggttttttgtagttttaattttttcgagtgttgggattataggtgtgagttatcgtgtttggtttttttagaggttttgtttaatttttatcgtttttagaggtttttttaggttggttttttgtagggtcgtttatttagttagaatgttttttttggtgggaatgtgttttttgtttagtgggtttttttattgtagtttttcgttatagaggagaggggttttatttgttttatttattgttgtgtttttggcgtttagggttggtatggaattcggggggtgttatgtgtttattt

SEQ ID NO: 177 - DNA, 11000 bp, Artificial Sequence
  chemically treated genomic DNA (Homo sapiens)
gaaaggcgagcgttggtcgaattttatttgattttagttattttttaggagtggtttggtgtagattataatatttgttatttatgtatttacgtatttttttttgaaaggagttgtagagtttttggaattttattttttagcgaggaaaattttttagatttttattgttttttggagggcgggggtagggttggtgaaaatatgagaaagttttttcggtgtattttatttgtttttacgtgtaaatagttgtacggttttttttttattaattttattagaaggtatattagtaataattaaggacgttataggaaaatgggaaggtcgtttcgtagatcgcgcgttttgtataatgattcggggagtgaatgggggagtacgttcggttttggttttggttgttataagatgagaataattagtaaatttttttttattatttaatttcgcgtggtaataaaatggatttttttttatgaatgtttggtcggtttatttattattttttttttattagtaattttttgtttcgtatttagttttttaattttttattttttttcgttttttagcgtatatagtgttttttatgttaggtcgggttcgtttttattttgtaattataaaggttattaaagtaattatcgtcggttttgattggaaaagttggttattaattagtttttttttgttttcggtgtagcggattagttggtgtcgggattgagttaatggaaacgcgggttaaatgagaaaagacgttcggatttttttgtttggatgcgcggttcggaggaggatcgcgaggttttttagcggcgggaggcggtggagtcgtcgcggagagggagggaggttttggagagggagggaaggaaagggggagggagagggaaaggggggagagggagaggaggcgcggggtgggggaggggagtgagtagggagtcgggagagggaggaggggcgggaattaggggagcggttcgaatttcgtttggttcggatttcgtagttatcgttgggtttcgtcgtcgggtcgtttttcgcgtggagattcggttcgcgtttttttttcggttttttttttttttttttttttcgttttttttttttcggtttatatagttttttttagaaagaagttattttagagtcgcgcgatttagttttagagttcgtcggggttcgtttatcgggttttttgcgcgttttttttcgttttttttcgggtatagttcgtttacgaaatttaaggcgtcggttacgcgttatttttttcgggtcggggttttttcggttttcgcgcgggcgttggttttttcgggtgggcggtagtttcgttttgtgtttttttgggtcggcgcgagggattttagagcgcgcggggggttttaggcggggaggagcggtcgcgatttcggatgcgagaggcgtgtgggtttaagcggcgtcgggataggggtcgggttttttgtttattttagggtttatgttcgtttgcggggtcgcgtttttcggagttatatttgggcgggagggtttttttcgggggttcggtttgcgtttttcgtcgtttttcgtttttcgtttttcgtttttcgcgggtttcgtttggttttggtcgacggaataagaataataaaggaagcggcgcgatcggcggagggggcgttcgtcgtttttttattttttatttcggtcgggtcgatggttttcgcgcgtttttattcgttttagcgcggaggcgatttcggtttcgttgtttcggcgtcgggaggatatcgcgcgtttacgtggatgattgcgttcgggaatagggatttttcgaatttttttgtttcgcgtcgtgaggtttatacgcgcgcggtgattattttggttttgagggggcggcggggttacggcgtgtggcggattcggtagtggtatttaggttgtgcgcgcgggtgtgtggggtttcgaggcgtagggcgatcgtcggtttcggtttttcgaggaaggggtataggcgttgttcgcggttattcgggttaggtgagggtaggggacgcgcgggggtcggaggaggaggtttggtttgcgggcggtaggagggattcggggttagtcgaggttgtttttagggaggtagatatttgttgtcgtcgggattttcgatacgtttcgtacgcgcgggagcggaatcgggtttgttttggaggttttttttggcgcgtttggatttatttaaaggttaaagaaaaatgttaaggagagcgattgtttggagagtttttggtttttttttcgggttttcgttgggttttaggagttttcggaggggaagtaaggagttttagtgttttggagttttgtttttattaatttcgttcggttttttgttgtttaggttcgcgttgttttagtagaggaggggtgggagtcgttttaggtttattttttcgcgtcggtttataaggaggttttttttgtaatttgggagaggtcgggggaggttcggagggcgatcgcgcggggtcgcgggatttggatagtcggggagtcgtgatcgcgggtagcgtcggggttgagggcgaggagggttttattgtagggaagggcgggacgttggatagagggatcgattggggtttatcggtttgatatagaagtcgttggattttagggttcggttgggaaattcgttttttattcgttcgcgggcgtcgtagaagaaatcgaagaaagaggttttttttttacgtttaggacggttttaagtgttttatttagcgttgagtaggagggtgatgcggagggaaaaattgttggttgtaagttaggttttaggaatttcggaagaaacgaagatttaaagaatttttttttaagtgattgagttttaataattttataatgatttgattttttttttgtggagttaaaaaaaatttttaaatttttgttagttatggtttttaagagaaagaaatgagtttaaaagtgagtttgaggtatagttttgatttaggtgtggttttggtggtttttagcgttattttttttatgggtatcgattttttaaggttgtattacggcgggtggattttaaagagagtttagattaattagaggtattttattagttttgatttgaaattgaaagaaaattatgtttaaatatttatgattttgatatttatagttaggcgtttttgaaaagcggaatatttttttttgtatagcggtagtttaatgattgaaagtttggaatagagaagaagtgaggaggaggaggagggagaaggaggtttggtaatatagcggtaggggtgcgtttcgggtgggggagatgtatagataggtatattttagtgttgagtttttagaggtaggaatagtataatttaaaaaaataattaggaatgattaagttaattttattttaggttagatttattttgagaataagatgaagtataatatcgtatattttttttttttaatcgtttgtatttgtaattttttaaatttagaatagatagtattgtaaaagttgtgatttaaaataagtgtatgattatagagataatttgtggagttgttttagaatttagtatttgtagatattgttttgattaatttaaattattttgatcgtgtttttgagtggaggtgtatgaggtttttattttatgtttttgtgagttatttacgggaaaatgtttttagaatttttttagttgtttatgtggtaagtttaaaagaaaagaaaaaaggatatgttatgtttaaatttaattgtgagagttgatatagttatataaatataaaattttatggtaaatatgtgttgacgggtagttagatttagtttttttttaaggttgtgtgatataattagttaataggagtagtttattttttgagttacgatgtgtagtattaaaatatgtttgtattataaagacgtagggatataggtgttcggtgttagttaatgttaaatttttaatattgttgatgtttttatttgtattatttttaaggaattagattttagttttagttttattttatttttgtgtgtatttaaattattaaattataaatattttttttttttaaaatttagaagttagttttagagattattaatgagttgttgtaataagtttatttttggtttgttggatgaatttttttagaattattaggaaattttattttaaatttattaaaaggtattattaaaatataatatttattttagggttgatgaatattttaagtttttaggttatagtaagtgatttaatttgaaaatacgggggaaggggtgttttaaaatattttaaaagtattttttaaagttgttaacggaattatttttaatttggaatttgttatagaattttaataaatgagagaagttaggcggaaataattatgtattaattttttgtattataaaatttttttagaagttattattagagtaagaggtattgcggtttgaatttagggtgggagaagttttttgtgtaattgaaagttattgttttttcgtgtagatgaaattgtatttgtaaatttgttatttaagtggttaaaaaatttaaaaaagtaaaagaaaagaatttttaaggaaaaattatttttaaatgtaaattttaatgaaaataagttgggatatattgttttaaaatgggttatttgttgagtttttttaggtatatatttaaaagtgaatatataagaaaggtaataaattgtttatttgttatttttaagtatttttaaaatattagttttaaagaaatattgtgttttaagatattagggaagatttatgatattgatgtttaaagggggaagtatttttgtgtaaattaattttaattagtagattgttttcggtgggagagagggatttagaggttgagtaggggaaggatgtttttgagaaagtcgtttttagttttttttagatttttcgttggcgtttttatgatatttaaatttagatttagcggattatatttaaggtatcggtttttgatttttatttttggttcgttcgtttggtttttaggtttgtttggacgtacgcgcgttttttatattaggtgtttttcgggacggggtttggtttttttatttcgtaagaattagattttttttaggattgggggggttatcgtttcgttttttttattcggatttagaagttttaatttaagattcgtttagcgtcgtttgttagaatttttttgtggtacgattttgagtagagggcgagggaaaggagggttagcgttcggtttcgttttttgtttgggttttttttttcgttttttcgttttttttttttcgtcggtttatcgtatttttataggagttataaagattaggttttagcgtcggatataaaggttaagggttttcgggagtcgcgggtatttagagttaggagaggggtttcggcgcggagggtgttgcggtttagttttttggttatagagcgcgtcggtcgcgagggaggattaaggtttttaattacgttcgcgtttattcgtgaatttcggcgttcgtagttttcgggcggcgtagtcgttatcgtcgtcgttttttttggagcgtagaggggtgtgtttgggagggggcgggagggtatttttttttgtgtcggtgaaaggaagagtttttagttttttttttcgtataaatttttatttttttttttgttcgatcgcgttttaaaatttgggatcggcgacgtaaggatagtttggtttggcgaagatttttcggatattttgcgtttcggattttaggcgggtggttttacggtgtcggtcgggacgcgtagttcggggggcgggattacgttcgggatttcggggtcgttgttcgaggacggaggtcggtgatttgaatcgcgtcgtttttagggttgtggcggggttttttttttagtcgtttagttcgtagcgtttagtttagcgtattgaggattaaaaagggcgggagatttttttcggttttaaaaggtaattgtgttgagattttaattttaatttgggggttcgttcgattttttggagtaacgtttttttaaaattacggagtaggttagtgttcggaattgtataggtagttacgaaggaaggaaatgaagtttttcgttttaatagtttcgggtttagttataagtttttttttggcgagtacgcggtcgttttatttggggtgggggaggcgttgagaaagcgtagttttttttgggggaggagagatggttttttagaggcgtttttatttgtttttggaacgtttttttttgtaggttttttcggttttttgtaattcgtcgttcgttgggatatttttatggttcggaggcgcgttttcggattttggtgaggagggtgaagagcgttttaaaatgggttgagaggaaaatgcgtttatattggcgtttttttattttggttgttcgtttttttttttttttttttttatacgttttttattttcgtgtttgtatttttttatttttagtattttgtaatggtcggaattgtagggagtggggagtaacgcgaaaggtcgagagaagagcgttggggagaagtttcggaggttttagattttttggggcggtttttgcggggcgttgggttaggatagttgttaattttttaaatttgtgcgtttagaaggagttgttttttgttcgtttttttttataggtttattttagatttatttggggatgattttaggcgtagtttttttttgtcggtttaagtttttgataggagttttgcggcgaggtagagattttttgaattgagtttttcgacgttttagttgttcgttagagtttttatgcgcgttttttagttttcgaaagttttttttttcgttttattatttacgcgtttggtgatgttttcgtgggttttttttgtttttttcgtttttattttagtttttttcgttttttttagggtttatttaatcgtattacgagcgttcgcgtttcgttcggtatttttggttatttgtagttgggtcggcgtttagcgttcgcgcgggaggaggtgggggcgtgcgtcgggtcgagcggtttcggggcgtagtagttgcgggtagcggtagcgttattattatagttagttgtttttttgcgttggagttatagattagcggggttattcgtttttgattataaatttttagggcggtcggaggagataaaggtgtcgcgcgtcgttgttttagtagtagcggttgcgcggcggtacgggttcggagttcgtaggcgtcggagttttgcgcggtcgttcggtttagtttcgcgtgtttcgtttcggttcggttttcgggttaggtacgttgggtcggggcgcggcgcgggcgggtttagggcgggtttcggacggtttcggtagggtcgtcggtcgcgcgcgtagtattaattagcgcggtcgtcgcgtttcgttttatattcggttcggcgcgtattcggtcggcggcggcgcggttcgcggtttagttatcggttgttatagcgatgtttttttttttttttatatgttgttgatagtaattggttaaggggtcgcggttttttaaatattttttttcgttcgagattatgaatggatattagttttgttagttattggtataacgtcgaagttagggttttcgttttttttttttttttagtgttttttttttttatcgtttatattgggtaagtttagggtagtatcgaggggagagagatttcggttagaaaagttaaggcgcgcggttttgttgtgatttttgttttgggaggggtgggtggggtgcgtcgttatttttggtaagagaaaattgtacggtatatcgttttttttagttattttttttagtgttgtcgttcgggtttttttgttttttttttaaatggaagtaggttaatgatttagggcgagtagacgagagtttttttgtttattttattagggttttttcgagtgtttaggtttcgatgcgcgtagaaagtgttttgcgagacgcggaattggtgagattttgttattatttggtttaggttaatgtcggtcgttagtttaaaacgtcgaagggagacggcggtgaaaatttaggcgtgcgagttgcgtttttgtttttttttttatttaggttaatggtttggtttagattatcgttttgcgggcgaaaggagtggagtagaattataggttacgtttttagtcgttcgagtttgtttatataattttcggtttttggcgtagttaggttcgtagcgggcgagaagagttagggtttcggggcgattaggattattgagtatttttttttcgcgtttttcgtttatgttttttttttttaggttttggatttcgggttatagttataggttggggtatttcggtgcgcggcgttttcgcggagttggcgagagtcggagagttgaaatttaatatttgtgtgtataatgcgtttttcgaggtttatagttgtaggaataaggagaagaaaggaagaggggggcgtagattttgttatacgtagatgatagtttgcggagggttttttagtttttttttttttggaaattttagcggtttttttttaggttttttttttttatcgtttggttattgttttttgcgttcgggatagttggagacggcggttcgcgttattcgacgtttttttcgtcgtatattcggttgttcgcggcgttcgttttcggttttttcggggttaatttttttatattttttatttttttaggttaggtttaggcggcgtttttatagttttttttttttttttttgtattttggcgttgtttttagatttgttcggtgtagagggttttgtttggcgttttttttttataaatttagttttgtaaaatttgggggcgagttttagggggtagggtttagaggcgggggttgtttatagatatgagtacggtgtcgttcgttgtaggtttttgtttaaaagtggtcgaaggatttcgttttttttgattgtaggtttaggttgagtttcgtatttatttttgtatttatagggtaaggttagagcgttttataaagttttagggtaaagaagtggtttcgtatcgggttatggttttcgtaggtttgagcgggttgtaggaggttcggtgcggttcggcgggggcgcgagaggcgagaaattgcggcgttattggcgttttttgtttatgagtgaatttttttagtaggcggggacggggtatattattttggttttttcgttttttttgtttagggtaaggttcgtaaaaattttcgtattttggttcgggggcggcgcggcggcgggtaggttagagagaagcggtattcgggtttttttagcgttcgggatgtttttttagggattttttcgggtaaagagtcgagtggtagcggtttttgttttttttcgttattttttttcggtgtttcggcgtttttagttaggttttagggcgattttaggttcggttttgggtagagatagaggaggggaggggaggtggcgttggggggcggggggtcggagacggcgggaggaggattcgggagtcggggcgggaagaggggaagatagcggagagaagggacggggaggggagggggttcggaggaggggatttgttgtttttagtttggttggtaatcggtttttttatagtaacggttagcgcgcgcgtttgtgtgtgcgcgcgtgtttgatgtgtgtgtgttcgtggtgttttcgggatttttcgcgggggttgggaggggatcgtagaattttagggtggcgatagagtaaatttttttaggattggaggttcgattttcgcggtgttgggagcgttttagggtttggttgcgtcgcgttggcgacggggtaggttcggggaacgcgcgtaggtttcgggatcggtcgttggggtattggggtattttgttttcgttgtttcgattttttcgttgcggtcgtagggttttggggtatcggggagtgggcgggtttttttagcgattcggagtataggggcgggcgacggcgtttttattatggttttgttcggttcgagcgttcggcgtatttgaggtttgggtcggggagtagttggggaatcgcgcgtcgtttcggggagttttcggttaggtcggtttcgggtagaggttagaggggttttggcgtatttttttcgttcgcggcgatttcgtattatttttttcgttagttcgcggtttttttcgttttggatcgtcggagttttatttaggttggggtttttagtaggcggtcgggagtttttcgaggtggttaggagtggtcggtagtcgtttttttcggttaggtcgtgtttagttttttagtttttacggcggcgtagatcgtacgcggttattttgggtttcggatagggttagggggacgtagattttgtcgtttgggggttttggggcggttacggggtcggcgattttagagtaaggcggagtttagtataggttagagagttggttttgttttttttatagatatgatttgatagtgaatatataaataaatataatttttttcgttagttttttttttcgttgttttagtgttttatttttaatattaaagtatcgtatttttgatttgattttaatttaatgatttgtttttttagtgttttgaggaaagatgggtgggaggtggtattaatttagtttaatttgggttattttaaaaatcgtgagagggtttgaaaggttttatgcgggtttattagtagaatagtatattttttcgtttacgttttggtgtatttgcggtaatatattttgggtggtagacggttatttatgtttgagagtttttaatttattttttttttttttattattttttttttaaggtgcggtttgattttagtggggttgtagaattggtttcgttaaagttgaaggcggatt

SEQ ID NO: 178 - DNA, 11000 bp, Artificial Sequence
  chemically treated genomic DNA (Homo sapiens)
ggttcgtttttagttttggcgaggttagttttgtagttttattgaggttaggtcgtattttagaggaggggtggtgggaggaaggggagtgagttggaggtttttagatataaataatcgtttgttatttagaatatattgtcgtaggtgtattaaggcgtggacgaggaagtgtgttgttttgttggtgaattcgtatggaattttttaggtttttttacgatttttaaagtgatttaaattgaattgaattggtgttattttttatttatttttttttaaagtattagaaagataggttattaaattaagattaaattaggaatgcggtgttttgatgttggaagtgaaatattgagataacggaagaagggattaacgaaaagaattgtatttatttgtgtatttattgttaggttatgtttgtgaagaaagtaaaattagttttttggtttgtattaggtttcgttttgttttggggtcgtcggtttcgtggtcgttttaggatttttagacggtagggtttgcgtttttttagttttgttcgaggtttagggtggtcgcgtgcggtttgcgtcgtcgtggagattgaggggttggatacggtttggtcgagggagacggttatcggttatttttggttatttcggagagttttcggtcgtttgttggagattttagtttggatgaggtttcggcgatttagggcgaggagagtcgcgggttggcggggaaggtggtgcgaggtcgtcgcgggcggggagggtgcgttagggtttttttggtttttgttcggagtcggtttggtcgggagtttttcgaggcgacgcgcggttttttagttgtttttcggtttagattttaggtgcgtcgggcgttcgggtcgggtagggttatggtgggggcgtcgtcgttcgtttttgtgtttcgggtcgttgggaagattcgtttatttttcggtgttttaaggttttgcgatcgtagcgggagggtcggggtagcgagggtaggatgttttaatgttttagcggtcgatttcggggtttgcgcgcgtttttcgagtttatttcgtcgttagcgcggcgtagttagattttagggcgtttttagtatcgcggaggtcgggtttttagttttggaggggtttgttttgtcgttattttagggttttgcgatttttttttagttttcgcggggagtttcgggaatattacgggtatatatatattagatacgcgcgtatatatagacgcgcgcgttggtcgttgttatggagaggtcggttattagttaggttgagggtagtaggttttttttttcgagttttttttttttttcgtttttttttttcgttgttttttttttttttcgtttcggttttcgagtttttttttcgtcgttttcggtttttcgttttttagcgttattttttttttttttttttgtttttgtttagggtcgggtttggggtcgttttggagtttggttggggacgtcgaggtatcggaggagggtggcggggagggataggaatcgttattattcgattttttgttcgagaaggtttttgggagggtatttcgggcgttgggggaattcgagtatcgtttttttttgatttgttcgtcgtcgcgtcgttttcgagttagggtgcgggggtttttgcgggttttgttttgggtaggggggacgagagggttaaggtgatgtatttcgttttcgtttattggaggggtttatttatgggtagaggacgttagtgacgtcgtagtttttcgtttttcgcgttttcgtcgagtcgtatcgggttttttgtagttcgtttaggtttgcgggaattatggttcgatgcgaggttatttttttgttttggagttttatgaagcgttttggttttgttttataaatataaaaataaatgcggaatttagtttgggtttgtagttagaggaaacggggtttttcggttatttttagataggggtttgtagcggacggtatcgtatttatatttgtggataattttcgtttttgagttttgttttttggggttcgtttttaggttttatagaattaggtttgtgagagaaaagcgttaggtaaggttttttgtatcgagtaggtttaggggtagcgttagagtgtaagggaggggaggggagattgtggaagcgtcgtttgggtttggtttggggaggtggggggtgtggaggagttggtttcggaggggtcgggagcgggcgtcgcgggtagtcgggtgtgcggcgggaggggcgtcgagtggcgcgggtcgtcgtttttagttgtttcgggcgtagggaataatggttaggcggtgggagaggggggtttaggagggggtcgttggggtttttagaaaaggagaaattaaagagtttttcgtagattgttatttgcgtgtgataagatttgcgttttttttttttttttttttttttgtttttgtagttgtgggtttcggagagcgtattgtatatatagatgttgggttttagtttttcggttttcgttagtttcgcgggggcgtcgcgtatcggggtgttttaatttgtggttgtggttcggggtttagggtttggggagagagagtatgggcgggaggcgcgggggggaggtgtttagtggttttagtcgtttcgagattttagtttttttcgttcgttgcgggtttgattgcgttaggggtcgggggttatgtgggtaggttcgaacgattgggagcgtggtttgtgattttgttttatttttttcgttcgtagagcggtggtttaggttagattattgatttgggtagggggaagggtaaggacgtagttcgtacgtttgggtttttatcgtcgttttttttcggcgttttgggttggcggtcgatattggtttggattaaatggtggtaaagttttattagtttcgcgtttcgtaagatattttttacgcgtatcgggatttaaatattcgggaggattttggtaaagtgagtagaggggttttcgtttattcgttttgaattattggtttgtttttatttggaaagggagtaaaaaggttcgaacggtaatattggaaaaggtaattgggaagaacgatatgtcgtgtaatttttttttgttaagagtggcgacgtattttatttattttttttaggataaaggttatagtagagtcgcgcgttttgatttttttggtcgaggttttttttttttcggtgttattttgaatttgtttagtatgaacgatgaaagggagaaatattgaaaagaaagaaaaggcgaaggttttggtttcggcgttgtattaatgattgataaagttgatgtttatttatagtttcgggcgggagagggtgtttggagagtcgcggttttttagttaattgttgttagtaatatgtggggggggggggggatatcgttatagtaatcggtggttgggtcgcgagtcgcgtcgtcgtcggtcgggtgcgcgtcgggtcggatataaggcggggcgcggcggtcgcgttggttggtgttacgcgcgcggtcggcggttttatcgggatcgttcggagttcgttttgagttcgttcgcgtcgcgtttcggtttagcgtgtttagttcgggggtcgggtcggggcggagtacgcggagttgggtcgagcggtcgcgtagagtttcggcgtttgcgggtttcgagttcgtgtcgtcgcgtagtcgttgttgttggagtagcgacgcgcggtatttttgtttttttcggtcgttttagaagtttgtggttagaagcggatgatttcgttagtttgtggttttagcgtagggaagtagttggttgtgatgatggcgttgtcgttattcgtagttgttgcgtttcgaggtcgttcggttcggcgtacgtttttattttttttcgcgcgggcgttgggcgtcggtttagttgtaggtaattaggggtgtcgggcggggcgcgggcgttcgtagtgcggttgggtgggttttggaagaggcgagagaggttgggatgggggcggagggagtaggaagggtttacgagagtattattaggcgcgtaggtggtggggcgaggaagagagttttcgaaggttggagggcgcgtatgggggttttaacgggtaattagggcgtcggagagtttagtttagggggtttttgtttcgtcgtaggatttttgttaaaggtttgggtcggtaggggagagttgcgtttgggattatttttaagtgggtttagggtgggtttgtgaggaggagcgggtaaagggtagttttttttgagcgtatagatttggagggttggtagttgttttggtttagcgtttcgtagagatcgttttaaggagtttaggattttcgggatttttttttagcgtttttttttcggtttttcgcgttgttttttattttttgtagtttcgattattgtagggtgttgggggtgggggggtgtaggtacggagatgggaggcgtgtgggaaaggaggagggaaggggcgagtagttaggatggagaggcgttagtgtgggcgtattttttttttagtttattttggggcgttttttattttttttattagggttcgggagcgcgttttcgagttatgggagtattttagcgggcggcgaattgtagggaatcgagggggtttgtagggagaggcgttttagaggtaggtggggacgtttttgagaggttatttttttttttttaaagagaattgcgtttttttagcgttttttttattttaggtgaggcggtcgcgtgttcgttagagagaaatttgtgattggattcgaagttgttggaacgagggattttatttttttttttcgtaattatttgtgtagtttcgaatattggtttgtttcgtggttttagagaagcgttgttttagggaatcgggcgaatttttaagttagagttaaaattttagtataattgttttttagggtcggagagagtttttcgttttttttggtttttagtgcgttgagttgggcgttgcgggttggacggttgggagaggggtttcgttatagttttgaggacgacgcggtttaagttatcgattttcgttttcggatagcggtttcggggtttcggacgtggtttcgtttttcgagttgcgcgtttcggtcggtatcgtggagttattcgtttggagttcggagcgtagggtgttcgaggggttttcgttaaattaggttgtttttgcgtcgtcgattttagattttaggacgcgatcgaataagagaggaagtgaaggtttgtgcggaggagggagttggaagtttttttttttatcgatatagaggaaagtgttttttcgtttttttttaagtatatttttttgcgttttagagaagacggcggcggtggcggttgcgtcgttcgggggttgcgagcgtcgggatttacgggtggacgcgggcgtggttggggattttggttttttttcgcggtcggcgcgttttgtggttaggaggttgggtcgtagtatttttcgcgtcgggattttttttttggttttgaatattcgcggttttcgggaatttttggtttttgtgttcggcgttggggtttgatttttatgatttttgtggggatgcggtgaatcggcgaggggggagggacggggaagcgggggagaaagtttaggtaggggacggggtcgaacgttgatttttttttttttcgttttttgtttaaagtcgtgttatagaggggttttgataagcgacgttaggcgggttttgggttggggtttttgagttcgggtagaggaggcgaagcggtaatttttttagttttgaagagggtttggtttttgcggggtggggaggttaggtttcgtttcgagaagtatttggtgtggaaggcgcgcgtgcgtttaggtaggtttggggattaggcgggcgggttaaaaataggggttaggagtcggtgttttaagtgtgattcgttgagtttgagtttgggtgttatgaaaacgttagcggagagtttgaaagaggttgggggcggtttttttaggggtattttttttttgtttagtttttgggttttttttttttatcggaggtaatttgttggttagaattagtttgtataagggtgtttttttttttggatattagtattataaattttttttgatgttttaaaatatagtatttttttaaaattgatgttttaggagtgtttaaagatggtaaatagataatttattgttttttttgtatatttatttttaagtgtatgtttggaaaaatttaataaatagtttattttaaaatagtatattttaatttatttttattaaagtttatatttaagaataatttttttttgaagattttttttttttgtttttttgggttttttggttatttgaatggtagatttgtaagtataattttatttgtacggaggaataatagtttttagttgtataaagggttttttttattttgaatttagatcgtagtgttttttgttttgataatagtttttgaaaagattttgtaatgtagagaattaatatatgattattttcgtttgattttttttatttattagaattttgtggtaaattttaaattaaaagtagtttcgttaatagttttaaaaaatatttttaaaatattttaagatattttttttttcgtgtttttaagttggattatttgttatggtttgaaaatttaaaatgtttattagttttaaagtgagtattatattttagtaatgttttttagtaaatttagaatgaaattttttaataattttaagaggatttatttagtaaattaaagataaatttgttatagtaatttattaatggtttttaaaattgatttttaagttttaagagaaaaaggtatttataatttagtaatttaaatgtatataaagataggatgaggttgggattgaaatttgattttttagaaatgatataaatgaaagtattaataatgttagaagtttaatattaattggtatcgagtatttgtatttttacgtttttatgatgtaagtatattttaatattgtatatcgtgatttagagaatgaattgtttttgttaattggttatattatataattttggaaaaggattaaatttggttattcgttaatatatatttattataaagttttgtatttgtgtggttgtattagtttttataattgagtttgggtataatatgtttttttttttttttttttaagtttattatatggatagttaaaaaagttttgaaggtattttttcgtaaatggtttataagggtatggggtggaagttttatgtatttttatttaggggtacggttaaaataatttaaattggttaggatagtgtttgtagatgttaagttttaagatagttttataaattgtttttgtggttatatatttattttgaattataatttttgtaatattgtttattttaaatttgaggagttgtaggtgtagacggttgagaggaagaaatatgcgatattgtattttattttatttttaagatagatttaatttgggataaaattaatttaattatttttgattatttttttaaattatattatttttgtttttgagaatttagtattgaagtgtgtttatttgtgtattttttttattcgggacgtatttttgtcgttgtgttattaggttttttttttttttttttttttttttattttttttttgttttaaatttttagttattgagttgtcgttgtatagaagggggtgtttcgttttttaaaaacgtttgattgtaaatgttaaagttataaatatttaaatataatttttttttaattttaagttaagattgataagatgtttttaattagtttgggttttttttggggtttattcgtcgtggtgtagttttggggggtcggtgtttatgggggagatggcgttgaggattattaaagttatatttgggttaagattgtgttttaaatttatttttaaatttattttttttttttaaaggttatggttagtaggagtttgaagattttttttaattttataaaaagggagttaagttattgtaaagttattggaatttaattatttagaaaaaaattttttaaattttcgtttttttcgggatttttaagatttgatttgtagttaatagttttttttttcgtattatttttttgtttagcgttgggtgggatatttgaaatcgttttgggcgtggagggaagattttttttttcggttttttttgcggcgttcgcgggcgggtaggaagcgggttttttagtcgggttttgggatttagcgatttttgtgttaggtcggtggattttagtcggtttttttgtttagcgtttcgtttttttttgtagtaagatttttttcgtttttagtttcggcgttgttcgcggttacgatttttcggttgtttaggtttcgcggtttcgcgcggtcgtttttcgggtttttttcggttttttttaggttgtaggaggggtttttttgtggatcggcgcggggaggtgggtttggggcggtttttattttttttttgttgggatagcgcgggtttaggtagtagggagtcgggcgaggttggtggagataggattttagggtattggggttttttgtttttttttcggggatttttgggatttagcggggattcgggaggagagttaggagttttttaggtaatcgttttttttgatatttttttttgatttttgagtaaatttaagcgcgttaagggaggtttttaaagtaggttcggtttcgttttcgcgcgtgcggagcgtgtcgagggtttcggcgatagtaggtgtttgtttttttgggaatagtttcggttggtttcgggttttttttgtcgttcgtagattaggttttttttttcggttttcgcgcgttttttgtttttatttggttcgagtgatcgcgggtagcgtttgtgtttttttttcggggagtcggagtcggcggtcgttttgcgtttcggaattttatatattcgcgcgtatagtttgggtgttattgtcgggttcgttatacgtcgtggtttcgtcgtttttttagaattagggtggttatcgcgcgcgtgtgggttttacggcgcggggtaggaaggttcgggaagtttttgttttcgggcgtagttatttacgtgagcgcgcggtgttttttcgacgtcggggtagcggggtcggggtcgttttcgcgttggggcggatggaggcgcgcgggggttatcggttcggtcgggatgaggggtgggagggcggcgggcgtttttttcgtcggtcgcgtcgttttttttgttgtttttgtttcgtcggttaaggttaggcgggattcgcgggaggcgagaggcgaggggcgaggggcggcgaggggcgtaggtcgggttttcgggaaaagttttttcgtttaggtatggtttcgggggacgcggtttcgtaggcgaatatggattttggggtgggtagaggattcggtttttgtttcggcgtcgtttggatttatacgtttttcgtattcggggtcgcggtcgttttttttcgtttggggtttttcgcgcgttttagggtttttcgcgtcggtttaggagggtatagggcggggttgtcgtttattcgggagaattagcgttcgcgcggggatcgaggagatttcggttcgggggaggtggcgcgtggtcggcgttttaggtttcgtgaacgggttgtgttcggggaggggcggggaggggcgcgtaggagattcggtgggcggatttcggcggattttggggttgggtcgcgcggttttagagtgatttttttttggaagaggttgtgtgggtcggagggaggggggcggaggggaggggaggggaggagatcggggagggggcgcggatcggatttttacgcgaagggcgattcggcggcgagatttagcggtggttgcggggttcggattaaacggggttcgggtcgtttttttggttttcgttttttttttttttttcggttttttgtttattttttttttttatttcgcgtttttttttttttttttttttttttttttttttttttttttttttttttttttttttaaagttttttttttttttcgcggcggttttatcgtttttcgtcgttggagaatttcgcggttttttttcgagtcgcgtatttaggtaggaaaattcgggcgtttttttttatttaattcgcgtttttattaatttagtttcggtattagttaattcgttgtatcgaaggtaaaaggaggttaattaatgattagtttttttagttaagatcggcgataattgttttggtggtttttatgattataagataaaaacgggttcggtttgatataagaggtattgtgtacgttgggagacgggaggaaatgaagagttgggaggttgaatacggagtagaaaattattaatagaagagagataatgaataggtcggttaggtatttatggggaaaaatttattttgttattacgcgaaattaggtggtggaaaggggtttgttaattgtttttattttgtagtagttaggattaaggtcgggcgtgtttttttatttatttttcgagttattgtgtagggcgcgcggtttgcggggcggtttttttatttttttgtggcgtttttaattgttgttaatatattttttaatgaagttaatgaggggagagtcgtgtaattatttgtacgtggagataagtgaaatgtatcgaaagggtttttttatatttttattagttttattttcgttttttaagaagtagtgagaatttgaagggtttttttcgttgagaagtgaagttttaaaggttttgtagttttttttaaggaaaaatacgtaggtgtataggtggtaagtgttgtggtttgtattaggttatttttggagagtgattggagttaggtgggattcgattagcgttcgtttttt

SEQ ID NO: 179 - DNA, 1743 bp, Artificial Sequence
  chemically treated genomic DNA (Homo sapiens)
ttgttttttaaatttcgtcgtaattgtgaatgtttgcgatgttattatatttttagtataagagaattggagtatttttggttttttttataatcgaagggtttttagcgtagggcgtagggggagaggttcgaagttttggagatagcgttcgagggatggaggtcgcgttcggttgcgtttaggttcgggtggtttcgggagttgagatttcgtaggatgtagcgggggggggttagggtttgattttttatttttgcgagttagggtcgtttacgtttttattgttttttataggtaacgtttagttttttttttttttatttttcgaaatatttcggtttcgtttcgtttcgttcgtcgttcgtgatttcgatttcgattcgttcgcgacggcgttttttttaggaggtagcggaggattagggttaggtcgtttattttggcggcggcggcggttttcggttaaggcggattttggggaggatagtagttgggtcgcggtttgtttttagggggagcgggcgtagggtcgcgagtgggtagcgttttcgtttcgtacgaataaagcggttaggcgcgtcgggtcgaggtagtatcgttttttcgggagcgcggggggcggggaggatggcgggggtatttatttgagggtcggcggagggcgcgggcgggataggtttaggagacgggatcgcggcgggtcggggtttcgcgtcgagggcgtacgggttacggggaaggggcgatcggcgcgacgttcgcggcggggttcgggagtttcgcgtcgcgggtcgggggtcggggttcgagttcgattttgcggtcgcgaggtatgggaatcggttcgtcgggttaggtagcggtgttaggtagtaggggtagcgacgtcgtcgtttttttttttttttgttttcgtttttgtttcgtcgcgttttcgttttcgttgggttttcgtcgtcgtcgttttagtttcggcgtttttcgggttttttttttttattaaggtcgggtcgattcgtagggattatttcggaaagtgaggggttgttgtcgtttttcgtagttgttggtggttatttttaattttttttttttttttgttttttttatttttcgttggttgtttgattgattgattggatttttttttttttttttttgttttttttattgagtcggtcgtagaaattgtagtcgtttagtttttatttttttttgttttttttttttttttttttattttttttttttttttcggtttttcgtttttgttttatttttagcggttgttttcgtttttgtttgtagatagcgtcgttggatgtttttagttggattttaattttattttttttagtttttttttttattgttttttagacgcgtttttttttcgtttcgcgtttttttttttttttttatttttgttttttttcgcggcgtttattttttttagttttagtttttgaaaggatttagttgagaaaggataattgggtttcgttttttttaattttatattttttagttggatgttgttagaggcgatggagaaacgtaaaggtgcgttaattttattttagttagagtataaaagaattgtttacgttagttattgtattacgtagtttcgaaatttttgtacgtttttttgtgtggttttcgttcgtgatgggattgtagttgaggagttcggttttaaatggtgtttttcgttagtgattttgagtcggttgttta

SEQ ID NO: 180 - DNA, 1743 bp, Artificial Sequence
  chemically treated genomic DNA (Homo sapiens)
taggtaatcgatttaaggttattgacggaaggtattatttgagatcgagttttttaattatagttttattacggacgggagttatataggagagcgtgtaggagtttcgaagttgcgtagtataatagttggcgtgggtagtttttttatattttggttagagtaaaattaacgtatttttgcgtttttttatcgtttttgatagtatttagttaaagggtgtagggttaaggaaagcggaatttagttgtttttttttagttgagtttttttagaaattgggattgaggagggtgagcgtcgcggagaggggtaggggtgggagaggagagaggggcgcggggcggggaagaggcgcgtttggaaggtagtggggagagggattgagaggagtggggttgaagtttagttgggagtatttagcggcgttgtttgtagataggggcgaaggtagtcgttgagagtgaggtaagagcgggaagtcgagggaagggaaggaagtaaggaaagaggaaggaaaggtaggagggggtagaagttgagcggttgtaatttttgcggtcggtttagtaggaggagtaggaggggaaagaggaggatttagttagttagttagatagttagcgggaggtggagaaagtaggaggaggaggaggattaaagatggttattaatagttgcgggaaacggtaataattttttatttttcgggatggtttttgcgggtcggttcggttttgatggagagaagaaattcgaggagcgtcgaggttgaggcggcggcggcggggatttagcgaggacgaggacgcggcggagtagggacgggggtaggagaagggaaaggcggcggcgtcgttgtttttgttgtttagtatcgttgtttggttcggcggatcggtttttatatttcgcggtcgtagaatcgagttcgggtttcggttttcggttcgcggcgcggggttttcgggtttcgtcgcggacgtcgcgtcggtcgtttttttttcgtagttcgtgcgttttcggcgcggagtttcggttcgtcgcggtttcgttttttgggtttgtttcgttcgcgtttttcgtcggtttttaggtgagtattttcgttatttttttcgtttttcgcgttttcggagaggcggtgttgtttcggttcggcgcgtttggtcgttttgttcgtgcggggcggaggcgttgtttattcgcggttttgcgttcgttttttttagggataggtcgcggtttagttgttgttttttttagggttcgttttggtcgggagtcgtcgtcgtcgttagggtgggcggtttggttttagtttttcgttgttttttggggagggcgtcgtcgcggacgggtcggggtcggggttacgggcggcgagcggagcggagcggaatcgggatatttcgggggataggggaggagagggttggacgttatttgtgggaagtagtgggggcgtaggcggttttggttcgtaggggtaggggattaggttttggttttttttcgttgtattttgcggggttttagttttcggagttattcggatttgagcgtagtcgagcgcggtttttatttttcgggcgttgtttttagggtttcgggtttttttttttacgttttacgttggaagtttttcgattatggaaggagttagagatgttttagtttttttgtattggggatgtggtggtatcgtaaatatttatagttacggcgggatttaagaagtag

SEQ ID NO: 181 - DNA, 10196 bp, Artificial Sequence
  chemically treated genomic DNA (Homo sapiens)
aagtgtacgtttatcgaggaggtagttatagttataattatattgttatagtcggcgtatatttgtatcgggttatagttacgattatatattaattatagttatatatatagatagaaatatgtagttattcgtaggtatttttatttgaattttgtcgtatatagttatatagtatatagtcgtatattattacggggataaacgtagtaatatttaattaggtataagttttttatagtcgtatatataatgtcgtacgtggttttgtttttttttatatatatattagtagttatagttttcgaggtcgtgttgtatacggtgtgagcgttggaaatatatttattataagggtagtttgttataatcgcgcgattatttattatatatttttatatagacgtaagcgtacgtttttaattttatttttatcgtcgtataaagtcgaggtttggttttcggtttcgttttttttcgggttttttattttaggttttattagttttcgaagtagtagaatttttttcggtattggggtagttgttggtaaagttttgagggtttcgttagcgcgtgagttggaagttgaattatcgcgagaagtatagttttgtcgaggagatttttgggaagcgtagttagagacgtattaaggtcggataagatggttttcgatcgttagaatttttgttcgcgttttgcgttagtttcgtcgaaaggatcgttttttttagttaaatcgttcgcgttttagaggttttatggagtttcgttttaggttcgggttttggtttttaaagaaagttatttcgacgtgtttgagatgggtttagttttcggattcgttttattgtttttaggcgttggatagttttagaaagaggataagtttgtatggaaagataatcgtataattgagttttttgggagatgtagttcggagttgggaaggcggttggatttttcgaaagttattttaattgtttttatagataagtcggtgttgggttgtcggtttgagtattgtgcgtttagagtgcgtaggcgtaaatattttgggttgttgttttggtttttttgttcgggcgtgaattttgtttattgttttttagtgtagaggggttatgggattagaggttgtgagatttagaagtggttggggacgtagaaggggtgtagattaggaatttgcgatttgatggggggaggtcgaagggaaaggaatcgttaaacgtgggataggtttggagaggtagaaagagaggagtttgaaattgtaaagggtaggtgttattttgatttttgtgtgttttgtgataaatgagtggggtaggaagtaagaggagttttattttttttttttgtaattatttgtgtatttggattaagtgtattttatggttagtatttgattgtttttgatttataaaggtattgtatatatagttatgtatagtttaataataaggatatatgttttttttacggtttttttttttttttttttttacggtttttttttgatgtcgagttaaagttggattgtattgttgttttttcggtttattgtaatttttttgtttgatttttttgttttagtttgtcgagtgtttgcgattgtaggcgcgcgtcgttacgtttgattggttttcgtatttttttggtttttattaaatatagggtttcgttgtgttggtcgggttggtttttagtttttaatcgcgagtggttcgttagtttcggtttttcgaggtgtcgggattgtagacggagttttgtttatttagtgtttaatggtgtttaggttggagtgtagtggcgtgatttcggttcgttataatttttttttagtcgtttgttttggttttttaaagagtcgagattgtagtttttgtttcgtcgttattttatttgggaagtgaggagtttttttgtttggtcgtttatcgtttgggatgtgaggagtttttttgtttggttgtttagtttggaaagtgaggagcgtttttgttaggtcgtttatcgtttgggatgtggggagcgtttttgtttcgtcgtttcgtttgggatgtgaggaacgtttttgtttggtcgcgatttcgtttgggaggtgaggagcgtttttgttcggtcgtttcgtttgagaagtgagattttttgtttggtaatcgtttcgtttgagaagtgaggagttttttcgttcggtagtcgtttcgtttgagaagtgaggagttttttcgttcggtagttatttcgtttgggaagtgaggagcgttttcgttcggtagttattttattcgggagggaggtgggggttattttcgttaggttagtcgtttcgttcgggagggaggtgggggggttagtttttcgttcggttagtcgtttcgttcgggagggaggtgggggggttagtttttcgttcggttagtcgtttcgttcgggaggcgaggggcgtttttgtttggttatttttattgggaattgaggagtttttttgttcggttagtcgtttcgttcgggagggaggtgggggggggttagtttttcgttcggttagttttttcgttcgggaggtgaggggcgtttttgttcggtcgtttttattgggaagtgaggagtttttttgtttggttacgattttatttgggaggtgtatttaatagtttattgagaacgggttatgatgataatggcggtgttgtggaatagaaaggcgggaaaggtggggaaaagattgagaaatcggatggttgtcgtgtttgtgtagaaagacgtagatatgggagtttttttattttgttttgtattaagaaaaatttttttgttttgggattttgttgatttgtgattttatttttaattttgtgttttttgaaatatgtgttgtgtttatttagggttaaatggattaagggcggtgtaagatgtgttttgttaaatagatgtttgaaggtagtatgttcgttaagagttattattattttttaattttaagtatttagggatataaatattgtcgaaggtcgtagggttttttgtttaggaaaattagagatttttgtttatttgtttatttgttgatattttttttattatcgttttatgattttgttaaatttttttttgtaagaaatatttaagaatgattaattaaaaaaaaataaataaataaataataaggatatattttggtcgggtgcggtggtttacgtttgaaattttagtattttgggaggttgaggggtttgagattagtttgggtaatatggtgtaaatttcgtttatattaaaaatgtaaaaattagtcgggtatggtggtgcgcgtttgtagttttagttattcgggaggttgaggtaggagaatcgtttgaatttaggaggtagaggttgtagtgagttaagattgtattattgtattttagtttgggcgatagagtgagattcggttttaaaaaaaaaaaggatatattttgagaaatgtattgttgggtaattttattattatggagtgtattgatataaatttagatggtatagttgattgaatatttaggttatatggtataatttgttgtttttaaattataaagttatatagtatgttattgtattgaatatagttggaatattgtagggattagttttataaggtttgtgggtttttttttttgtgtgtagagattagaggtggtagaaataaagatataagataaagagataaaagatatttgggttcgggtgagttattattattaagatatagagattgatagtggtttcgaatgttaggttgtattgttatttattggatataagataaggggggtagggtaaggagtgtgagttatttttaatgataggtaaggttacgtgggttacgtgtttattggatagggggtttttttttgtttggtagttgaagcggagagagagagaagatagtttacgtattatttttgtatattagagatttttagtatttttattaattttgttattgttatttagaaggtagggttaggtgtataggatggaatatgaaagcggattagtagtgtgattattgaagtatagtattataggaagacggttagatttttagataattgcgggcgggtttgatttatgttaggttttttataagatatggtggagtagagttttttttaaattttttcggggaaagggagattttttttgttggtttgttaagtagtgggtgtttttttttggtattgacgttattgttagattataattcgtttggtaataggcgtttttttagacgttaacgtttcgttagattaaggagttttttggtggttttgttcgggtataatagaggtttatatatttgttttttggttattttttattatgtttttttagtttatatttttgtatggtttggttttttttaggttatgattgtagagtgaagattattataatatttgaataaagagtaattattataaattaatgattagtgatatttgtgtataattatatttgtgatttgtatttagtgtaatttttgttattttatatattttattatattgaaatagtttatgttttcggttttttgtttcggtatttgggtggtttgttgtttatagaatataatggtaagtatttatgtatttaaatatatttaaatatataaaaggtatagtaaaaaaaatagtatgaaaagtaaaaaatggtatatttgtatagggtatttattaagaatggaggttgtaggattggaagttgttttggagagtcgatgagaggtgagtgaatgtgaaggttaggatattatagtataatattttagattttataaatattgtatatttaagtaatattatatgtatttaaagttttttttttataataaattaatttttgtttgttgtaatttttttattttataaatgtttaaatttttaaaagttttttgatttttttgtaatatcgtttagtttaaaatataaatatattgtatagtttatgtgggattcgtattttttggtaaggaaatgttgtaggttagatgttatttttatgtggttatatagaggtagaaagattgtatatatgatattgttttttttaattacgggttcgtattttaatatatcgtaataatgtttaatatttatggggttatagaaaataggatttattatggttggagaatttttagagttaatttaagtttaggaatgttggtaatgagaatgattagtaggaattagtgtaatgatttatatagttgaaattattaattgggttaggttggtggtttacgtttataattttagtattttgtgaggttgaggtgggttgattatttgaggttaggagtttgagattagtttgggtaatatggtgaaatttcgtttttattaaaaatataaaaattagttaggtatggtggtatatatttgtgatattagttattcgggaggttaaggtaggagaattgtttgaatttgggaggtagaggttgtagttagttaagattatgttattgtatttaagtttgggtgatagagtaaagattttattttaaaaaaaaagttaaaatagaataaaatatatagttattatttttttgtttggggtaattttaaagttttttttttgttataaaaataggaatgtattatgtaaaggtttgaaataggttattttttttttttttttttttgagttggagtttcgtttttgttgtttaggtaggttggagtgtaatggtatgatttcggtttattataatttttattttttgggtttaagtaatttttttgttttagttttttaagtagttgggattataggtatgtattattacgcgtggttaattttgggtttttagtagagacgggatttttttatgttggttaggttggtttcgaattttcgattttaggtgatttgtttgtttcggtttgttaaagtgttgggattataggtatgagttattgtgtttggaaaataggttatttttttaaataaaaaggtaatgatttataaaagtttatgaatagaatatgtaattagttgatataaatttaataggatttgtttaaaattagttaaatttaatatatttgaagtgtttttgtataaagtattatatgaagaaaagaagaatttattaatgttttaaaaaaatgggtttttttatagataatatgataatttattattaaaagtgtttcgggacggtcgggtgtagtggtttacgtttgtaattttagtattttgggaggtcgaggcgggtggattacgaggttaggagatcgagattattttggttaatatagtgaaattttatttttattaaaaatataaaaaattagtcgggtatggtggcgggtgtttgtagttttagttattcgggaggttgaggtaggagaatggcgtgaatttgggaggtagggtttgtagtgagtcgagatcgtgttattgtattttagttcgggcgatagagtaagattttattttaaaaaaaaaaaaaaaaaaaaagtgttttaggagatataaggaaatgtaatattattttttttgaatatttttagtttaagattttttatttaataaaataggaaaggatttgaaattgagaaaatgtatttgagtataaatagtttgtgaaatataatatttttttttgtattattagagggttttattgaatttataattaatttgtttatttagtatgtaatttagatgtgagtgaggggtcgggcgtagtggtttatttttgtaattatagtattttggaaggtagaggcgggcgagttatttgaggttaggagttcgagattagtttgattaatatggtggaatttagtttttattaaaaatataaaaattagttgggcgtggtggtgtatatttgtaattttaggtatttcggaggttgaggtaggagaatcgtttgaatttgggaggtagagattgtagtgagtttagatttcgttattgtattttagtttgggtgatagagtaagattttattttaaaataaaataaaataaaaaaaatagatgtgagaggatagaggtgttttataggagtttgtattgtttttaattttatgtgtgtaggtatttattataggtaaatagtttttttatattttgtagttatatgattttgttattagtaaaaagaggtaaatagtttttgtagaatgaagggattatagttacgggattagagttatagaatgaagttttttttttaatattttttaatttgatgtttgaatttttttttttttttttttgagatagttttgttttttcgtttaggttagagtgtagtggtacgattttggtttattgttattttttgtgtttaaataatttttttgttttagttttcggagtagttgggattataggcgttcgttattatatttagttaatttttgtatttttagtagagacggggttttattatgttggttaggttggttttaaattttttattttaggtgatttattcgtttcgggtttttaagtgttgggattataggtatgagttattgcgtatggttcgatgtttgaatttttaatgtagtattttagagaagggtgttcgggattttttgtgtttaagggatcgataaagaaaaaagttttatttattatttgggatttgatgtatagatgaaaaatttaatatataataacggaagtcggttgttagtaaattatattttagttttttagtatttttataagagacgatatttttagttgtttagtttttgtagttttagtacggtaatattaatgatgtttatgtttagaattagttaaaaagattataatttgttttttttagtttatttattttttattggtttatggttttaagtgtatttgaatgattatttttgggtattttttgttattgtttattagggtgttgtcgattgtttttatgttttgtgggttggttgggaaggggagtttgggaaggatgtgttatttttaggaggttgtaagttattgggacgtttttagggatgattttttttatggttgtaggaagtttttttggagttacgtttacgatgtttggcggatatttgtatgttgtatcgttgagttcgggatgaattgtttgttggtttattgttgattaaggcgttgatgtgataaataattttttgtttatatagttttttaagttttttgggacgcgatttgtgatgattcggcggatttcggtggtagttgttttttttatttttagtgacgtttgtatgttgttttaggtagtgtgaggagtgaagatgagatttggcgtattttttaacggagtttgagtaaagttaaagggtttcgattcgtgtaagttaagggttgttttttttattttgttttttttgaggatttgtgttaaggtttttttatttattaggttattatgggttgcgtttataaggaatgttttttgttttatttgttttatagtaaagttattgacgaggtggtggttatgtttattgagattgtagtgtaacgagatatagttattttgatatagtaaattttgtagggtgtattagggttttttttgtatgttttgggatttttttattttgttttataagtaggggttataaaatacgacgttgaatttaaaggttttggtttaaattgtaatcgtttgttttatgtaatcgaagtttatgaggtttagcgttttttacgaatgagggttatttttatggttatttcgagaatttgttttacgttttgaattcgcgcgtttttttatagtgtttggtatagttatatattttttcggtagagattgaggatgtggtagatagtggagttggttgttttttttacggttgtggaggggatgttgtatatagtaattcggagtttattggtagttttgatgtttacgttgtcgtagttatttgtttatttatacgattatttttagggttttgaatttttttaggtttttttttgtttagaattttttcgtggattttttgcgtggattgtgcgttatagaaggttatagtggttaggttttttaggatgggtatttttacggtgtaggttatagttatttagcggcgttagtagcgggagggggtgtagggggttgttcgtgatttgagggtggatagttttataagttttgtttaatcgttgtttcgtgattttgtgtttatttattagggttattttttatggaattttgtaatttttagattaaaaggtaaagtaggtttggtatggtgttttatgtttgtaattttagtatttgggaggttgaggtaggtagattatttgaggttaggagtttgagattagtttggttaatatggggaaatattatttttattaaaaatataaaaattagttgggtatggtggcgcgtttttgtaattttagttattcgggaggttgaggtaggagaattatttgaattcgggagttagaggttgttgtgagttgagattatgttattgtattttagtttgagtggtagagtgagattttgtttttaaaaattaaattaaaataaataataataataaaataaaaggtaaagtagttttttaaaaatttacggaaattcgtaggagtgtgtgtgtatgacgttattatgaatttaatatatatttgtttataaattttatagtttataggatgggttgtttattttttttttttttttttttttttttttgtcgttaggttggagtgtagtggcgcgattttagtttattgtaatttttatttttcgggtttaaacgattgttttgttttagttttttgagtagttgggattataggtgtatattattatatttggttattttttgtattttagtagagacggggttttattatgttggataggatggtttcgattttttgaattcgtgatttatttgttttggttttttaaagcgttgggattataggtgtgagttattagttgtttatttttttaagggaatgtagtttcgttagtttaaaaatatttaaggtgatgaaattttcgttttgggtagttagtatttatagcggaaaggttttcgttttttttattttatttggaggttgtgttgttttagtttagtgtagtatggtttttggtttagtttttcgtttttcgggtcgtttttaagttattttaaa

SEQ ID NO: 182 - DNA, 10196 bp, Artificial Sequence
  chemically treated genomic DNA (Homo sapiens)
tttaaggtggtttgggagcggttcgaggagcgaaggattgaattaggagttatgttgtattgaattgaggtagtatagtttttaggtggggtgggaggggcgggagttttttcgttgtggatgttgattgtttaggacgagggttttattattttaaatgtttttgaattgacgaagttgtatttttttaaaaagatggatagttagtggtttatatttgtaattttagcgttttgggaggttaaggtaggtggattacgagtttagaagatcgagattattttgtttaatatggtgaaatttcgtttttattaaaatataaaaaatagttaggtgtggtggtgtgtatttgtaattttagttatttaggaggttgaggtaggataatcgtttgaattcgggaggtggagattgtagtgagttgagatcgcgttattgtattttagtttggcgataaaaagaaagaaagaaagaaagaaaagatggatagtttattttgtgaattatagagtttgtggatagatatgtattgggtttatagtggcgttatgtatatatatttttgcgagttttcgtaagtttttagaggattgttttgttttttgttttgttgttgttgtttgttttggtttggtttttggagatagagttttattttgttatttaggttggagtgtagtggtatgattttagtttatagtaatttttgattttcgggtttaagtgatttttttgttttagtttttcgagtagttgggattataggagcgcgttattatgtttagttaatttttatatttttagtaaagatggtgtttttttatgttggttaggttggttttaaatttttgattttaagtgatttgtttgttttagttttttaagtgttgggattataggtatgaggtattatgttaggtttgttttgttttttgatttgagagttgtaaagttttataaagaatggttttggtggataagtataaaattacgagatagcgattggatagaatttgtgaagttatttatttttagattacgaatagttttttgtattttttttcgttgttggcgtcgttggatggttgtgatttgtatcgtggagatgtttattttgaaggatttggttattgtggttttttgtgacgtatagtttacgtaggagatttacgagaagattttaaataagggaggatttggagaagtttaaggttttgagagtgatcgtgtggataggtaagtggttacgataacgtggatattaaggttgttagtgagtttcggattattatgtgtaatattttttttatagtcgtggaagaggtagttaattttattatttgttatatttttaatttttgtcggaggaatatgtggttgtattagatattgtgggaaggcgcgcgggtttagagcgtggagtagattttcgaggtggttatgggagtggtttttattcgtggaagacgttaggttttatgggtttcggttgtatgaggtaggcggttgtagtttgagttaaggtttttggatttagcgtcgtattttatgatttttatttgtaggataagatagagaggttttagggtatgtagaggggattttgatatattttgtagggtttgttgtattagagtgattgtgtttcgttgtattgtaattttaatgaatataattattatttcgttaatgattttattataaagtagatgagatagggagtattttttgtgaacgtagtttatggtggtttggtggatgagaaagttttagtataggtttttaaggaggataggataggaggggtagtttttggtttgtacgaatcggagttttttagttttgtttagatttcgttgaaagatgcgttaaattttatttttattttttatattgtttaggatagtatgtaggcgttattggagatgaaggaggtagttgttatcgagattcgtcgagttattataggtcgcgttttagaaagtttaagaaattgtgtgaataaggagttatttgttatattagcgttttggttagtaatagattagtaagtaatttatttcgagtttaacggtgtaatatatagatattcgttaggtatcgtgggcgtggttttaggaggattttttgtagttatggaaggaattatttttggaggcgttttaatgatttataattttttgagagtgatatattttttttaagtttttttttttaattagtttataaaatatggggataatcgatagtattttaataagtaatagtagagaatgtttaaaggtaattatttagatatatttgggattatgagttagtgaaaaatagatgaattaagagaaataaattatggtttttttaattgattttggatataggtattattgatgttgtcgtgttaaaattataagaattagataattgaagatgtcgttttttatggaagtgttgaaagattaggatgtgatttattaataatcgattttcgttattgtgtgttaagttttttatttgtgtattaaattttaaataataaatggagtttttttttttatcggttttttgggtataggaggtttcgaatatttttttttaggatgttgtattgagagtttaaatatcgggttatgcgtagtggtttatgtttgtaattttagtatttgggagttcgaggcgggtggattatttgaggtaaggagtttgagattagtttggttaatatggtgaaatttcgtttttattaaaaatataaaaattagttgggtgtggtggcgagcgtttgtaattttagttatttcggaggttgaggtaggagaattgtttgaatataggaggtggtagtaagttaagatcgtgttattgtattttagtttgggcgaaagagtaagattgttttaaggaaaaaagaaaaagagtttaaatattaaattaaaaaatattaagaggaaagttttattttgtgattttagtttcgtgattgtagtttttttattttataggggttgtttatttttttttgttagtagtaagattatataattataaaatgtggagaaattgtttgtttgtggtagatatttgtatatataggattgaagatagtataggtttttgtgagatatttttgtttttttatatttgttttttttgttttgttttgttttgagatggagttttgttttgttatttaggttggagtgtaatggcgagatttggatttattgtaatttttgttttttaggtttaagcgatttttttgttttagttttcggagtatttaggattataagtgtatattattacgtttagttaatttttgtatttttggtagagattaggttttattatgttggttagattggtttcgaatttttgattttaggtgattcgttcgtttttgttttttaaagtgttgtgattataggagtgagttattgcgttcggttttttatttatatttgaattgtatattgagtgggtaagttggttataagtttagtaaaattttttgatgatgtaaaaaaaagtattatgttttataagttgtttgtatttaaatatatttttttagttttagatttttttttattttattgagtggaaagttttgaattaaaagtgtttaggaagaataatgttgtatttttttatgttttttgaaatattttttttttttttttttttttgagatggagttttgttttgtcgttcgggttggagtgtagtggtacgatttcggtttattgtaggttttgttttttaggtttacgttatttttttgttttagtttttcgagtagttgggattataggtattcgttattatgttcggttaattttttgtatttttagtagagatggggttttattgtgttagttaggatggtttcgattttttgatttcgtgatttattcgtttcggttttttaaagtgttgggattataggcgtaagttattgtattcggtcgtttcgaaatatttttaatggtaagttgttatattgtttatgaagaaatttatttttttaagatattaataaattttttttttttttatgtgatattttatataagaatattttagatgtattagatttgattgattttaaataaattttattagatttgtattaattagttatatgttttatttatagatttttgtgaattattgtttttttgtttaaaaagatggtttattttttaggtatagtggtttatgtttgtaattttagtattttgatagatcgaggtaggtagattatttgagatcgggagttcgagattagtttgattaatatggagaaatttcgtttttattagaaatttaaaattagttacgcgtggtagtgtatgtttgtaattttagttatttgggaggttgaggtaggagaattgtttgaatttaggagatggaggttgtggtgagtcgagattatgttattgtattttagtttgtttgggtaataagagcgaaattttaatttaaaaaaaaaaaaaaaaaagatggtttattttaagtttttgtatagtatatttttgtttttgtgataaaagaaaaattttaaaattgttttaaatagaaaaataatggttatatgttttattttattttaattttttttttgagatggagtttttgttttgttatttaagtttgaatgtagtggtatgattttggttggttgtaatttttgttttttaagtttaagtagtttttttgttttggtttttcgagtagttggtattataggtgtgtgttattatgtttagttaatttttgtatttttagtagagacggggttttattatgttgtttaggttagttttaaatttttgattttaggtgattagtttattttagttttataaagtgttgggattataggcgtgagttattagtttggtttagttgatagttttaattatgtaaattattatattgatttttattgattatttttattgttagtatttttgaatttaaattggttttggaaattttttaattatagtgaattttattttttatgattttataaatattgggtattgttgcggtatgttagaatacgagttcgtggttgggaaaggtagtattatatatgtagtttttttatttttatgtggttatataagaatgatatttgatttgtaatatttttttattaagagatacggattttatatgggttgtgtaatgtatttgtgttttaagttaagcgatattatagaaaagttaaaaagtttttaaaaatttgaatatttataaagtagaaaagttatagtaagtaagggttaatttattatggaagaaaaattttaaatatatgtagtgttgtttaagtgtataatgtttataaagtttagagtgttgtattgtaatgttttagtttttatatttatttattttttatcgattttttagagtaatttttagttttgtagtttttatttttggtaagtattttatataagtgtattattttttattttttatgttgttttttttattgtattttttgtgtgtttagatatgtttagatatataaatatttattattgtgttttgtgggtagtaagttatttaggtgtcgaggtaagagatcgagggtatgggttgttttagtataataaaatatataaaataataagaattatattagatatagattatagatatgattatatataagtattattaattattagtttgtagtaattattttttatttaaatattataataatttttattttataattataatttaggaaaaattaggttatatagaggtatgagttgaagggatatggtgagaagtgattagaagataagtgtgtgagtttttgttatgttcggatagggttattagagggttttttggtttagcggaacgttagcgtttgggaagacgtttgttattaagcggattgtggtttagtagtagcgttagtgttaaggaaaagtatttattatttagtagattagtaaagggagttttttttttttcgggggagtttagagaagattttattttattatgttttgtggagggtttgatatgagttaggttcgttcgtagttatttggaggtttaatcgtttttttgtgatgttgtgttttagtggttatattattggttcgtttttatgttttattttgtatatttggttttgttttttagatagtagtaataaaattagtgaaagtattaaaagtttttgatatgtagaaataatgcgtaagttgtttttttttttttttcgttttagttgttaaatagggaagggttttttgtttagtggatacgtgatttacgtgattttatttattattggagatggtttatattttttattttgttttttttgttttgtatttaataaataatagtgtagtttggtattcggggttattattagtttttgtgttttggtggtagtggtttattcgggtttaggtgttttttatttttttgttttgtgtttttatttttattatttttagtttttgtatatagggagaaaaatttatagattttgtagggttggtttttatagtgttttaattgtatttagtatagtaatatattgtatagttttgtagtttaggagtaataggttatattatgtagtttaagtgtttagttagttatattatttaggtttgtgttagtatattttataatgatgaaattgtttaataatgtattttttagaatgtattttttttttttttgagatcgagttttattttgtcgtttaggttggagtgtagtggtgtaattttggtttattgtaatttttgttttttgggtttaagcgatttttttgttttagtttttcgagtagttgggattataggcgcgtattattatgttcggttaatttttgtatttttagtatagacggggtttatattatgttgtttaggttggttttaaattttttagttttttaaagtgttgggattttaggcgtgaattatcgtattcggttagaatatatttttattatttatttatttatttttttttaattgattatttttgggtgttttttgtagagggggatttggtagggttataggacgatagtggagggaatgttagtagataaataagtgaataaaggtttttggtttttttaggtagaggattttgcggttttcggtagtgtttgtgtttttgggtatttaagattagggagtggtgatgatttttaacgagtatgttgtttttaagtatttgtttaataaagtatattttgtatcgtttttaatttatttaattttgagtggatatagtatatgttttagagagtatagggttgggggtaaggttatagattaataggattttaaggtagaagaattttttttagtatagaataaaatgaaaagatttttatatttacgtttttttatatagatacggtaattattcgattttttaattttttttttatttttttcgtttttttattttataatatcgttattgttattatggttcgtttttaatgagttgttgggtatattttttagatggggtcgtggttaggtagaggggttttttattttttagtaggggcggtcgggtagaggcgttttttatttttcggacggagaggttggtcgggcggggggttgatttttttttatttttttttcggacggggcggttggtcgggtagaggggttttttaatttttagtaggggtggttaggtagaggcgtttttcgtttttcggacggggcggttggtcgggcgggggattgatttttttatttttttttcgaacggggcggttggtcgggcggggggttgatttttttatttttttttcggacggggcggttggtttggcgggggtgatttttatttttttttcggatggggtggttgtcgggcggagacgttttttattttttagacggggtggttgtcggacggaggggttttttattttttagacggggcggttgtcgggcggaggggttttttattttttagacggggcggttgttaggtagagggttttattttttagacggggcggtcgggtagagacgttttttattttttagacggggtcgcggttaggtagaggcgttttttatattttagacggggcggcggggtagaggcgttttttatattttagacgatgggcggtttggtagagacgttttttattttttagattgggtagttaggtagaggggttttttatattttagacgatgggcggttaggtagagaagttttttattttttagatggggtggcggcggggtagaggttgtaatttcggttttttggggggttaaagtaggcggttgggaggaggttgtagcgagtcgagattacgttattgtattttagtttgggtattattgagtattgagtgaataagatttcgtttgtaatttcggtatttcgggaggtcgaggttggcggattattcgcggttaggagttggagattagttcggttaatatagcgaaattttgtgtttggtggagattaaaaaaatacgaaaattagttaggcgtggcggcgcgcgtttgtaatcgtaggtattcggtaggttgaggtaggagaattaggtagggaggttgtagtgagtcgagagggtagtagtatagtttagttttggttcggtattagagggagatcgtggaaagagagggagagggagatcgtggggagagtatatatttttattattaaattatgtatgattgtgtatataatatttttataggttaaaagtagttaaatattggttatgagatatatttagtttaagtatataaataattgtagaaggagaaagtgaaattttttttattttttgttttatttatttattataaagtatatagaagttagaataatatttgttttttgtaattttagatttttttttttttgtttttttaaatttgttttacgtttggcgattttttttttttcgatttttttttattaggtcgtaggtttttggtttatattttttttgcgtttttaattatttttgagttttataatttttggttttataatttttttgtattaaggagtaataaataaaatttacgttcgaataaagaggttaaaatagtaatttaggatgtttgcgtttgcgtattttgggcgtatagtatttaggtcggtagtttagtatcggtttatttgtgagagtaattaagatgattttcggagggtttaatcgtttttttagtttcgaattatattttttagaaggtttagttgtgcgattatttttttatgtagatttgttttttttttgaggttgtttagcgtttgggggtagtaggacgggttcgggaattaagtttattttaaatacgtcggagtggttttttttgggggttaaggttcgagtttgaggcgggattttatgaggtttttggggcgcgagcggtttgattagggggggcgattttttcggcggggttgacgtaaggcgcggataggaattttgacgatcgggaattattttgttcggttttgatacgtttttgattacgttttttagaggttttttcggtaagattgtatttttcgcggtaatttagtttttaatttacgcgttggcgggatttttagggttttattagtaattattttagtgtcggggagggttttgttgtttcgaaagttggtaaggtttgaggtgagaaattcgggagagggcggggtcgggggttaagtttcggttttgtgcggcggtggaggtgagattgaaagcgtgcgtttgcgtttgtgtggaggtgtgtggtgaatgatcgcgcgattgtgataggttgtttttgtgatgagtgtgtttttaacgtttatatcgtgtgtagtacggtttcggagattgtggttgttggtgtgtgtgtgagagggagtaggattacgtgcggtattgtgtgtgcggttgtggggagtttgtgtttggttgagtgttattgcgtttgttttcgtagtggtgtgcgattatatgttgtgtgattgtgtgcggtagagtttaggtggggatatttgcgagtaattgtatgtttttatttgtgtgtgtggttgtggttaatgtgtgatcgtgattgtgattcggtataggtgtgcgtcgattgtgataatgtggttgtgattgtgattgttttttcggtaagcgtgtattt

SEQ ID NO: 183 - DNA, 1231 bp, Artificial Sequence
  chemically treated genomic DNA (Homo sapiens)
ttatttaatcggtgatatagttcggggtttcgtcgttttttggcggttattacggattttcgttttttttatagaaggtagttattgtaacgtgcgtggttttagttgcgttatattcggtttttgcgattagggtttgaggaattcgcgttatgaagtgcgtgtttgttatcgtagggattattagttttgacgattttattgcgtgtgtgtcggcgttcgatagtttgtaagtgagtgagggaggcgagtaggcggcggtttggttcgttattcgttattttcggttatattgttagtcgcgttagttttgtttgatcgtcgcgttcggaaagaaattttcgtaattttattataggtgtcgttgttttttagttggtttttgtttacgttcggcggggttttttttcggttattcggttattcggggttgtttgttttttttttttattatttcggtcgttttttttttttatttttttagtttttttttcggtttgttttcgcgttttatttttcgttttcgcgtttttcgtttttttttttaacggtttcgttttttcgagttcgggttttttatcgggttcggtagtttttttttaggtttttttgtggatcgtacgtcggcgtcggcgtttgagttagtcgagttcgttttagagttcggttttttttttttagtatttggtcggagttcgcgcggtttttttttttagcgcgcgtcgtttttttagggttttcggttttcgtagttgattaagtgaggtagaacgggtagtgtttgggtttttttcgagtttgcgattttttttttaaagtttttttttgttgtggttttcgcgggattttgcgagttgggtcgtttagatttatgagtgtttgggaggtttttcgtcgggtttcggattagaaaatagttttgaaaattaagtgaaatcggttatagataggttttttggcggtcgtgtttcgatgttaacgttaaattttagtagtggtggtggtttttgttttgttttatatagttagtttaaaaggtttttatattttgatttttttttttagaaaatcgagagttttggttataatcgatttattttgtaaattggtagaggaacggtggtatttgaattttttagtattgagtcgtttattttggatgtttataggtataaggattttttgaaagaagatatttagaaagtagattttgttattagttacgtaggta

SEQ ID NO: 184 - DNA, 1231 bp, Artificial Sequence
  chemically treated genomic DNA (Homo sapiens)
tatttgcgtgattaataataagatttgttttttgaatgtttttttttaaggaatttttgtatttgtaaatatttagagtaaacgatttagtattgaagggtttaggtattatcgtttttttattaatttgtaggataagtcggttgtaattaaggttttcgattttttgaaagaggaaattagaatgtgagggttttttaaattggttatgtaaaatagagtaggaattattattattattaaagtttgacgttaatatcggagtacggtcgttaaaaagtttatttgtggtcgattttatttagtttttaaaattattttttggttcggggttcgacgaggaattttttaagtatttatgaatttaagcgatttagttcgtagagtttcgcgaaagttatagtaggaaaagattttggaaaaggagtcgtaaattcggggggaatttaggtattattcgttttgttttatttgattaattgcgagaatcgggagttttgaggggacgacgcgcgttgaggagaggaatcgcgcgggtttcggttaagtgttgaggggaaggagtcgggttttgaggcgagttcggttggtttagacgtcggcgtcgacgtgcggtttataggggggtttgaggaaaaattgtcgagttcggtggaaaattcgagttcggaggggcggagtcgttggaaggaggggcggaggacgcggaggcggagaatagagcgcgggggtagatcggaaaaggagttgaagaaatgagggagaggagcggtcggaataatgggaagaggaaataggtaatttcgagtggtcgggtagtcggagaagggtttcgtcgggcgtgggtagaagttagttaaggggtagcggtatttgtggtagagttgcgggggttttttttcgagcgcgacggttaggtaaggttaacgcggttggtagtatggtcggagatggcgggtggcgagttaagtcgtcgtttgttcgttttttttatttatttgtagattgtcgggcgtcgatatatacgtaatgaggtcgttaaagttggtggtttttacggtaataaatacgtattttatggcgcgggttttttaagttttgatcgtaagggtcggatatgacgtaattgaggttacgtacgttgtagtgattgttttttgtgagggaggcggaaattcgtaatggtcgttagggggcggcggggtttcgggttgtgttatcggttgggtgg

SEQ ID NO: 185 - DNA, 16425 bp, Artificial Sequence
  chemically treated genomic DNA (Homo sapiens)
ggtttttgtgttttggttttttttggtgtttttttttcgtttgtttttttttagtattacgattcggtgttttttatttagtttagtgttgtttgttagagtttcgggaattttttaagttttgtaaaagttttttttggttaggttgtagttaatgttcgtagttagagggtgggtgggtagggttgatggtggttttttagtcgttaggtaagagatttttagtcggagggtgggtgagtagggtcgatggtgtttttttagtcgttgggtgagagatttttaggtgtttaggttttttgggagggtgtggttggggttttttgggtttggcgttcggggagttggttagtggttatttatttttgagttttttagatttgtgtttattcggtatacgtgttgtgttttagggagagtcgttgcgttttggggttttggtgtttcggttttgatttggtttggttttagttttgggtttggagtttttatttttttggtattagtttttgtagcgttttgttttttggtatttttcgagagatgtattttaaaaataggatcgatttattgttggtgatgaggagagggcggtttgagcgtgagggggtgggcgttagttgtcggagaagtttttgttaggtaggagggacgagcgggtttttagttttgatttttcggtttttgtttatgtttgaaaatgaaatcggtggtttgggtggtcgttagttttttgtggtcgatagaagaaagtattatagttgggtttttaaataatgagaatttatttattgagttttgggagttagagttttgtagtcgaggggttcgtagggttacgttttttttaggttttttagaggggtttttttttgttttttttagtttttgttagatataggtgttttttggttgtggttttagcgttttagtttttgttttcgtttttatttaggtgattttttttgtgtttgcgttttttgtttttttttttataaggatatttgttgttgcgtttagataatttaggattttgaattcgattatatatgtagaaattttgtttttaaataaggatatataggtttcggggtcgggagtggatacgttttgttgggggttacgtttagtttttgtttgtaagtgtttttggatttttaggcgtttttaaggtgtaggatgtgagtttgtatttgtagatagagtttagaaaagttagataggtcgaggggtggcgttcgtgaattagaaagaggtttgagggtcgagcgtgggtttagtatgcgttttattattagttttgtaggggtagaggtttagggtggggtcggttggtttgtggaaggtgtgagaagtcgtcgtggtaaatttaatttttggttaggagtcggtttattgtggtttttgggttaaattttgtcggaatttgtttttgtaaataaagttttattggttcgtagttatttttatacgtgttatttgtggttgttttttagttaagtatggtaaaggagattttaagtttaattaagttaaaagggtgacgtcgggttttttataggtaagtttttgattttagttttgattgtattattgggaatgtaatttgttgaataaaggaggtgttggttgggggtaatggaaggaattggttgttattaggtgtcggagttgtttgttagggtgtggttaaggtgttattattatagagtagagttataggggaggaaaggtttttgtttgatttttgggtgattagtttattaaggtttcgaggaagttgaggttttcgaggtggaaggtggtggatggttggttagtgtgtgttttttgttgagtattgagggtgagttatgggttatttggtttttttgtgtatgggtagttagattgtagggaagacgttttggttttatagttggtaacgtagatagatgtgtatttgaatatgtaagtatgtattgagtgtttattgtatatagggtttttatatttttttgtagatggtttttacggtattgttgtaggtgggggtgttattgtttttaggttatagatgaggaaattgaggttaagattttaaggttatatagttgggaggttagagtagggatttttaggggttttgttttttaggggaagggagtgaaggggtggtttgtatggtgcgtgattatttttagtggaagttttaatatgggtgtggtttagttttttagggttttttaaggtagaggtggttcgggtttttgtagcgattttataatatattttaattgtagacggtggagattgcgggttgtttttcggtttaagcggttttggggttttcgttttgcgcggagttattcgtgtttatgttgtttttatatatcgttattttttgggtgttttggtgacgtatttgagggatattgttgttacggcgaatttcgattacgtcgttgtgtttgattttttttttggggtcgggcgttttgttttttgttttggagtttttagagggggttaggagattgtttggaaagttttagttgggtaggcggagttttgtaggtgcgggaatgagggggttttttttttaaattgggaatgtttagtttttttttagttgtaaacgttttagacgttgcggatagattttttaatgggaagtgaacgtattgtcgtcgcgtttatattacgttttgtttttgtgaattaagttttttggtatgtagttgcgtttaagggtttatatagggtttgaggttgtttttacgtagtaagggtggcggtgttgagtagtggtcgtagagtttgtgtggttttgaaagttgtatgtttgttttttggttttttgtagaggaagtttgttgatcgttggtttttgtggttatatagattttttggttttgcgggttgtggttatgtggttcggggaggtgggtacggttggggagggaagttgagtattatgtttgttttggattttattgtaaaaatgagtgtttgcgttaaatttatttgggattttggtttttacgtggttttgtagggtttgtgtgaagagtgagtatttgttttttagagttttagatgatacgttattttgtaatttttttcggggatattttttttaatttttttttgtatgtttatagggatttggggtgtttgtatgaggttttaaaatttatattttcgtcgaagtcgggtattttggagtttagttgtcggggtttaggtgggaggaggtttggttattaagtttggagttatgtcgggagggtcgggagtttttttgcgtcgttttttttgtttttttaggtagatttgttgttttcgttatttataggagtgttttcgggttaggtggtttgtttaaggttatatagggattgtgttgtgttaggtttgagttgtatttggtggagtagatagtattagtcggttgtttgtggtgatagtgacgttggaaaatgggaaggtgggggtggagacggggattcgagttgttttggagggttcgggaggtagaacgtaggtaggtttttagtagtcgaggaagagattagggtttgttgtgttgggtagtggtcgggtggatggggatgggatttaaggtttatcgattttttttattttttggggttgaagtttagttataatttgggaattaaaggaattaggaggggcggtgggtttcgaggtagtagggagtgggtataggtgtggttggtagggcggtaggataggagcggattggtagaattagggtaggaggttatagttatcgggtaggttttacgttgggtttttaagttcgtgattatagattttgtagtttttagtgtggtttagggggttttagggtttgggatagggtaaattcgttagtgaaggtttagaatttagttatgggagttagcgtcgggggttgggtatagatatgaatattttgagtttattttcgtttttgtagtttgtgggttttgtaaggggaggggatcgttttattttgtatgtcgggagtcgaagttttggtatggttgagtggttggtttgaggttatgattttagttcgggtttttgtattgttacggttttttcggggacgttaagggtgcgggtaggcggtgttggttggcgtttttgacggttacgttttttgtagattgtttgttgatgttggtttataaggataagtcggagcgtattaagggtttgcgggagcgtagtagtttgacgttagaggatatttgcgggttggagttcggtttgttttacgagggtttggtttatacgttggttattgtttgtttgttttaggttattatgttgggttttgatagttacgaggttatgtgtgcgtgggatgttcggattcgttatgcgttcggcgagggtgagtgacgggggtcggggtcgggcgggggtttttcgtttaggtgtgtcggggttttttattaacgtgggttgtagaggtgggagcggttttagggaatcgtgtaggaagatgggatatttatgggtgttttagggtggattgagttttagtttgggggtgtttacgagggtttgggagggggagtttgttgggttatggtgtttttagagttttttagtttgatcgttagttataattggagtttttaatttaagttggtggtttttggagggacgtggttttttaaagttttgttttttgttttttatattggatagtggagtttagagtttggttaggaaggagagttttaggttgggcggttttattttagtttttttttaaaataggatgggagggagggagggaatagagggaggggagagggaggggaagggagtgtttttttgtggaattggttttggaagaggtggaacgttagttttagttttgtaggggtttcgaatgggtgtttgggggtttttgggggttgagttgttttggggttgtgagtagaggtgggtggtgatggggttttgggtatttagcggtagagtaagtataattttgtattttttaagaaattaaaattagtgttaaaattttataatgagtaaaatagtagaatgtttattgagttgagttttggttttattttggtatttatttaataattttagtagttatagttgttttttttttaaaaatttgttattttaggttgggtacggtggtttatatttgtaattttagtatttcgggaggttgaggtgggtggattatttgagtttaggagatagagattagattattttgggtaacgtggcgaaatttcgtttttattaaaaatataaaaatgatggttaggtgtagtggtttatgtttgtaaattttgtgttttgggaggttaaggcgggtagattatttgaggttaggatttcgagattagtttggttaatatagcgaagttttatttttattaaaaatggaaaaattagtttggtgtggtggtgggtatatgtaattttagttatttaggaggttgagataggagaatcgtttgaatttgggaggtagaggttgtaatgagttgagatcgcgttattgtattttagtttgggtaatagagtaggattttattttaaaaaaaaaagagttgggaggtggaggttgcggtgatttgaggttgtgttattgttttttagtttgggcgatagagtgagattttgttttaaaaaaataaatataaaaaaatttgttattttgattagtatggattttgtataattttattttttaaaatattgattaaaatattttggtttttgatggttgagttttttggttttggaggtgagtgtttcgtttttttagttttgtttttaaggtagtagttttttttgttttattgagtggggagagagaagttgggggtttagtgggaggaggtgcggttggttttgtaggagggcgtaggggaaggagatattaggagggaagaattgtatttttttagaaagttttttcgttgggggttttttttagtttggtttagcggtatgggtttgttttttttattcgttggcgtagggttatggtatagaggtcgttgggtatcgtttaggtagttttattttgatagaacgtggtttgataaggatgcgtttgaggttatagtttggagtaggtagaggaggtagagaagggggaggtgggatgggaataggggtttttttggttttgggggttggagatggagtaggtggggtttttggtggggaggttgttgtttgtttggtgtgttgatttgggaagataggggaggtggggatagtatttaggattattgttttttttgaggtttttaggggtaggggtttgggtagagttagtgtataggattatgggggtgtttagggtttgggtgaatggttatttggatggagagagggtcggtggtgttttgaggttttcgtggttaggttggggtttcgatatagattttagattttttatattcgaattggaggttgggggatttttgagtttcggtttttttttttgtgatggagttatatagttgtggagagagagtttttttggagaggtgtcgggggtgggagtttagttagggtatttagttgttttgttttttttagtattttcgtggtgggaggggagggaggtggaggttcgaggttaggtttttttgggatttttttgtttttgaataaagatagtttttgggaggatggtaaggagagaagtgtagtttttaggttttttcgtggttgtgaggagtgttatttgtttattttgtcgtcgttgttttttcggttgatatttgggcggttgtttttatttgttttagtttggtttttgtttttgttgttttttttcgagatgtttttttattttatttgtttatagtggtttttgttgtttttttttatgatgttttttcgtttcgtttgatcgtgatgttttttcgtttcgtttattttcgatgtttttttattttattcgtttatgatgttttttcgtttcgtttgttcgtgatgtttttttattttattcgttcgtgatgtttttttattttattcgttcgtgatgtttttttattttgttcgttcgtgatgtttttttgtttcgtttgttcgtagtgtataggttttatgtgatagtggttttaggtattaagttggagagcggttcggttattttgtatttttgtaatgatgttttcgttttggttagggatattttttcggttgttacggggtagtggaagttgtttgattttcggcgttacggggtcgtgttaagcggatttatttttgaaggcgggattaggtgtgggtattgtaagtacggatgtgtggggttattgggtagtagtagtattttttattttttttgagaattgttggtttcgggtcggtcgattttatttgtaggttggtttgttggtatttttagaatgcgtcggtaggtggacggagtttttttacgttcgatgtttaaggttttttgttcgtaggaattttagtgtggagtgtcgaggaggggtttcggttatttttgtttttttttattggagggagagagtttagggatgcgaggaggggtttgaggttatagagttttagagtcgtttatatttagattttatggaaaggaaaaaataaagaataaacgtatttagtagtggggagtgtgagttttcgtataagtatcgtagaaatatatttttggattaagaatttttggtggatatgttagttatttcgtttgtgggtcgtttagagttgttttaatgtttttagtgaggtggttaggtcgtgggtggggatggtttgagttttttgggtttgtgaaggtttgagagttgtttttatttagttaggggagtgagggaaatcggagtaggaaggtatttagttttgtttagagagtttgaggtgttcgtcggggttgtgtaggagtaggttgttttagtaattttttttatttttttttatgttgggtgtagatgcgttaggttgttttgtggatttgtagttttcgcggagggtgtgacgtttttttttttttttttggaggggtagttgtttattggtcgggttgaaggcgggtagagggattttttgtgggtttggtttggggttgagaggattgagggattgtatttggtttatattggtgggggttttggtggagtttggatgtgtttgggtggaggaaacgtaggtaaggatacgggttatattggtcgtttgggattttattttgtaaaggttagttggggtacgggcgtaagtttatttgggtgttacgttttgttattttttgcgttgggcgttgggagtaaatttagtaggttttgtggtaggagttagttttgttggggtttttgaggagacgatatttgatttttgaaaggggaatagggtagtgaggtttaggttttacggattgggggcgtatatagttagttgtaggaggtacgtgcggtagagttggttcggagtttcggtttttggggttggtaggggttatagttagagtttaaagggttttggtttttttgggattggagagttagtatggatgggtagggtcgttgtttatgttagttgtgagttggtgcggggggtggggtggggggtggttttcgggagagttaggatatttgtcggggttttatttgtttttaggttttttttgcggtaggttagaggtttagtattggggtttcgggagttattggggagtgggttggcggtggttgggtatagtgggtgggtttagcgtttttgttttttgtcgtgtgggaagttagagttgtaggttgtagttgttttgatataggtagtttgttttgtttgttgtgtgttaggtttgggggtgtttggaggagggggatttatatttttttttttgtttgtggaattttttggtacgggtaggtagtcggtcggggtggcgtcgcgtgtttattttttaagtcggggtatagtaggaggattcgtttttttggagatttgtttattttgtttgggttataatggaatggggatattggatgttttttttttgaggtcgtggaggtttatatttttgtcgaggtgtgggtggtttttttttcgttggtaaataattttatatttggggttgtgtttttttttagggcgaggttattgtgtcgtttttttgggttgtttaaaagttgggggtatttttgtggggtcgtttgttttgttgttgttttttcggggtaagttgttagagtagttttattcgtaaatttgtaaattaggttggttttatagaatttgaaaatttgtaaatcgggttggttttatagaatttataaatttgtagattgggttggttttatagaattcgtaaacgggggttggttttatagaattcgtttttgtagtttagtgttgaatgttttcgttttcggtggtattttggtttgagagaggaagggttttgggaattcggttatcgacggttgtatatttcgtagggtaggtgggttttggaggttaggttggaaggtttggtcgagttatttatttttgtttttagtaggttttgttgggttgtatttttttggagataggcgtggttattattttgggtggtttaggttgggttttagattcggttaagcggtggtgtttttaacgtagtattgagtgtaggtcgtttggttggagggacggggagtttgcggtacgtgtgggtagtttggggttttttgcgggagggagtcggtaattcgggtggtttaggggtagcggtattagttttttggggtttttgtagtagatgatttttaagagagggttaagtgtttagaacgggttttttttgtagtttggaggttagaaattttaaattaaggggtttttagggttggttttttttaaaagtttttggggaggatttatgggaaggttttttttgttttttttagtcgttggtggtttcggcggtttcggttcgtggttgtgttattttagtttttgcgtttgttggtttttgcgtgagttttttttttagttttttgtagtttgtggatttagggtttatttggatgatttagggtgattttatttcgagattattaattttattcgtagaggtttttgtttataggttttggtatgtgaatatattttgtgggttattatttggtcgataattggggttattgggacggagaaatatttagaatttgaattttaataagtttgtgggtgtcgttatatttagtttggaggttatagttgggttggagtcgtgggaaggttttggaagtttttgggtgtaggaaatttatattttttttttttttagggataggttttagtttggttttcgatttttagaatcgttttatttggtttcgttatagttagttttgtagagagtagagagggtgattttggtttaaggcgatggttgcgttttatttattttgagatattgggcgtggttgtgtattacgggggttttggtgggggtcgggtggagataggtttggttggttttggtgtttggggggtagaggtttttttgtggatagttgtttgtttagaatgggataggaggtggtttggtgatagtaattttcgggtttttagtgtggtttaatttttcgtttttgttggttacgggtttgtagtgtggatttttggagtttggttcgagcgtatttggtatatggtaggcgacggtttgtggatagtttaggtttgtaggttttagttttatatacgggtaagtgattgggtttcgttttcggggatggattgtgcgtggtggagagtgatgtagagagggttattcgttttgggataggtttagtttgtagtatagacggtggtgggttttagagagggtgagtttatttagagtttaggaagggagggttttggaggcgtagggggacgtttgagttgggttttgagggtgaatggaagtttttggaggtgttttttttttttttttttatttgttttttttagttgggtttagtttaaggattatatttgtttttttgtttagtttttgggggtcgttcggagtatttgaaatttattttgatttttaaaaatgattaagaatgtggttaggtatagtggtttatgtttgtaattttagtattttgggaggcggaggtgggaggattatttgaggttaggagttcgagattagtttggttaatatggtgaaattttatttttattaaaaatataaaaattaggtaggtgtggtagtaggtgtttgtaattttagttattttagaggttgaggtgggaaaattatttgaatttgggagttggaggttgtagtgagttgagatttcgttattgtagtttagttaaggtaatagagttaggttttgttttaaaaaaagaagagtaaagaatgaaaatttgaattaggaggtttttgttatatgaacgcggtatttgtttagttttggagagttttttgtcggttatttttggttattgtagtttgcgggggtagtttggatagagttggttggaattttggtttttgttaggtagtagggagcgtttttagtagttttttattgtcgggcgttgggtttagggattagacggttcggttttagaggttgcgtgagattgagtgaggtatttttagtttttagagggtgcgaggggagttaggaggggtatagattttaggttgggggtattgcggggaagttttttggaggggcgagttttaggggatttttgtagggtgaataggagttagtttagttgttagagggtaaggggtggaggggggtgaaaagggtattttagatatttttgagtacgaatgggtgtttcgaagggttgtgtaggagttttgttgggggggataggaggcgtgagggtggaggaggaggaggagatagggttgggttgtagagagttggttaattggattagtgtttgtttgtattattgtttcggagtagtagggagttattgaaggtgtttgagtatggggagtgttttatatgttaatgttgatttcggggtgtagatgagtttggaggaagaggttggtaggggttagagaaggttttgattgaggtttagaagatggagggcgaggttgttttaggtagtagttgtttggttgggggatgggaattttgtggattgtaggaatgttaataaggtggtgatggataaggggaggagggtcggttcgggaagggggggttttttagagtggtgtttttggattggggttgttttaggagggtagaggaggggtgggagttaatatttattgttaggttttaggtttttttttattcgagatttattaggtggggttatttttaagtgtataagaagttgttattttgggggatggagagggttgagggttatgttattaagattttttagttttgtttatgtttatttggtatgagttatttaggatattttggttatttcgatgtttgttttttgaggagttgggattatgagtatttaagattttgatattaaggggtagttacgagggtatttaagaatatttagatggaaattattttagatttaattggtttattaaatgtttgcgtggaggagtatttttttttttaagtcggtgagttttggagttagtgtaatagtttttttattggagacgtgttttttaggaagtaggtgcgtttgtaacgtgggtgaggtttgtttgtcgtttagtaattttagtttttgtttagagttggcgtcgttttgagtttcgtagtttttggttttttgtttgtgttttgttgattttgttttgtttttttgcgttttttatgttttttttttttatttttacgttttttattttttataatagggtttttatatagttttttgggatattcgtttgtgtttaaagatgtttgacgtgttttttttatttttttttatcgtttattttttaatagttgagttaatttttatttattttgttatatttagcggttggcggttgttttttggttggtaattttgtgggttagggatttggacggggtttagtgaggatagtttatttttgttttatgaggtgttgtttggggtttttcgggtagtggtatttggttatggtggggtttaaaggtttaggaaagtattgtgtcggttgttggttgggttgttttagtttttttttaggaattttatttttcgataggatattttgggttttttaataggttttaagagagtagaagttgttaggtttttgacggttttggggtagggttgggagagtattttttatgttattttatgttagagttattattggttggtttcgattttagggagggagtggattagtttttggagaaggagcggtttttgagggtagggataggggaaatagagtggtcggttttgttgtagttatatttgtgtgatatagtaaaatggggtaggttttgtttttttttttttttttaaatatataggtaaataggaaatatgcgtattttgttttggggaaggggtaggggggcggttagtagttttttatttatgtttttttatttaaggtcgagtattgggggttttttggttatgggcgtttgggtggatattgagattatagacggtttgtgttttttgtcggtaaggtgtttagtttggtagtcgggacggtagtaggtggggttgaattttagaggaggcgttcgtgagagtattatagaggggttgtcggggttaggggattgaagggggttagaggttaagaaaagtattatgaaaggtgtcgttatgtggtttgagtttggaaaggtttggggtgttttaggtggttaggggtgtggagggtgggggtggtagttttttgagtggagatgtaggggtgtggagggtggggacggtagttttttgagtggagatgtaggggtgtggagggtggggacggtagttttttgagtggagatgtaggggtgtggagggtggggacggtagttttttgagtggagatgtaggggtgtggagggtggggacggtagttttttgagtggagatggtaggtagatttggtgtgtagagggagttttgagtatttttaagatcggggggggttgggtgggagcgggggtggagtatgaatttagggaggtttagcgagagtttagtcgtgcggtgttttgggaggttatggtttaagattttggtagattagtattggagatgggtatttttttttagggttattgatgttagttttgttggtatggatgatgggggtggttggcgagggtgtcgcgtgggtacgtgggagttcgaggttggcggtgggttgtgttttaggttttgttcggttgatcgtgttttcggggtgagtgacgtttcgtagacgtcgtatggaatgcggggtcggttttatttttttcgtaatgtggttttttatagtcgggggatttattgtttcgtggttattgttagttgtttgtaagtttaggattagagagtttggtttttcgtgagagttggggttgtgtcggttgagttttttatagggaggggtggattacggggatagggagcgattgtttggtattgagtgagttagttagtagatagtatgacggttttttttttgtttgtttttagggtttggtgtaggtttttttttgtttattttatttagtttgggggttttattttattacggtttttatgagtttttcggggtatttttttggatggtatcgtagcgggtattggttttttttttatgtttatttttaattttgattaggagtattttttatttatagtaggattggaagttttatcgggttagaaggtgtatagggggttaggggatttggatttgagtttatttcgtggttgtgtgatggtggataggtggcgtgttttttttgggttttagtgttttttttgttaaagtaggaatggcgttgttttatgattcggtttggggatattacgtggaaggaagtatttatagtataaggtgtcgttcgttttcgtgtgttcggggtggttgttaaggggtcggtagcgtcgttacgtgtcggggttggtttgagtttcgtgtttttggaatttatagtttgtgtttcgtgaaggtagagtatgattgggtagtaggtagcgggggttttaatgtcgagattttttttttttttaatttttgtttatttcggcgtttttttttttgcgtatttttttttgggtaatgggtagaggtttcggagcgggcgggatttttgtgaggtgacgttagtcggagtgtttagtcgggtgtagttagtttagtggtttatttacgcggtcgttagggttttatttatttttggtcgggagggtagcgttttcgtgattcgtagttggggtttttttacgggtggcggttgtatcgttttgttagtgacgttgggttggtttttgggggtttttttgttgttgtgggggtgtaggggtggatgttggttttaggatgttgtatacggttttagggtagtatttatatattggtagttttagttttttttgaaagatgatcgaggaggtggggaggacgcggtgttggttagtagtgacggttgtagtatgtgtgggtaggtgtcgtgttatattttttataaatatttgaatgtagtttttttaatagttcgggggaaggaagtgtggttatatggtagtttttttgggatgtgattttagttttaggtggtatagttttttttttttgtggttttggagttttgaggggattttatttgatgtttttggggttttttggttgttttatttgtttttaagacggttgtgggggtagggtcgttgggattttggggtagaggagggattgattaagtgtttgttgggtggtagagtagttatatttttttatttttttaagtaagttcggaaggtaggtatgtgggcgggggtatttatttgtttagggtagggtatttttttttttttttttatgttttgtcggttgtaggatttaggatgggcggggtagtatttattttagcgtttaagtttgaagggtgcggcggggtttttggggagtttagaggttttggggatttagttttatagagttaggtggggtgtcggttttgggtattcggatttacggggttaggcggggtgtcggttttgggtatttgatttcgtggggttaggtagggtgttattgtcggtttttggtggagtttgttgcggttttttgtgttttttttttttagggtttttagttcgttttcgggttagattgatttgtttttgttttttttttgtaggggttggcgttttttttttgttttcggtcgagggggagtagattagttttttgttcgattgtatcgttcgaggtattttttttattaagggtttttttgggttgcggtcggttttattaggtgcgtgtgggagttt

SEQ ID NO: 186 - DNA, 16425 bp, Artificial Sequence
  chemically treated genomic DNA (Homo sapiens)
aggtttttatacgtatttggtagaatcggtcgtagtttaaaggggtttttggtgggggagatgtttcggacgatgtagtcgaataggaagttgatttgttttttttcggtcgaggataggaagaagacgttagtttttgtagaggaaggatagagataggttagtttggttcgagggcgggttggggattttgaagaggaggaatataggaaatcgtagtaaattttattaagagtcgataatgatattttgtttggttttacgaagttagatgtttagagtcgatatttcgtttggtttcgtgaattcgggtgtttagagtcgatattttatttggttttgtgaagttgggtttttagagtttttggattttttagggatttcgtcgtattttttaaatttgggcgttggggtgagtgttgtttcgtttattttaggttttgtagtcgatagggtatggggaggagggagggggtgttttgttttggatagatgggtgttttcgtttatatatttgtttttcgggtttgtttggggggatggggggatgtggttgttttgttatttagtaggtatttgattagttttttttttgttttaaggttttagcgattttgtttttatagtcgttttgagggtaaatgaagtagttaggagattttagagatattaagtagggtttttttagggttttaaggttataggagaagggagttgtgttatttggagttggggttatattttaggaaggttgttatgtgattatatttttttttttcgggttgttgggagggttgtatttagatgtttgtaaaaggtgtggtacggtatttgtttatatatgttgtagtcgttattgttggttagtatcgcgttttttttattttttcggttattttttaggggaagttggagttgttagtgtgtgggtgttgttttgaggtcgtgtgtagtattttggggttagtatttatttttgtatttttatagtagtaggagggtttttagggattagtttagcgttattggtagagcgatgtagtcgttattcgtggagaagttttagttgcgagttacgggggcgttgttttttcggttaggggtgaatgaagttttggcggtcgcgtgaatgggttattgggttggttgtattcggttggatatttcggttggcgttattttataggaatttcgttcgtttcggggtttttgtttattgtttaaagaaaggtacgtaggagggaaggcgtcggggtgggtaggagttggggggaagggaaatttcggtattagaattttcgttgtttgttgtttagttatgttttgtttttacggaatataggttgtagattttagggatacggaatttaggttagtttcgatacgtggcgacgttgtcggttttttggtagttatttcgggtatacgagggcgagcggtattttgtgttgtggatgtttttttttacgtagtgtttttaaatcgggttatgggatagcgttatttttattttagtaaaaaggatattgaggtttagagaaggtacgttatttgtttattattatatagttacgaggtggatttaagtttaagttttttggttttttgtgtattttttggttcgatagagtttttagttttattgtgggtgaggggtgtttttgattagaattggaggtgggtatggaggggaggttaatgttcgttgcgatgttatttaggaggatgtttcgagaggtttatgagggtcgtgatggggtggggtttttaagttgggtagggtgggtagaagagagtttgtattaggttttgggggtaggtaaggagaaggtcgttatgttgtttgttggttggtttatttagtgttaggtagtcgttttttgttttcgtggtttatttttttttgtgaagggtttagtcggtatagttttagtttttacgaaaggttaggttttttaattttgagtttatagatagttggtagtggttacgggataatgagtttttcgattataaaaaattatattacggaaggagtggagtcggtttcgtattttatgcggcgtttgcggagcgttatttatttcgaagatacggttaatcgggtaaggtttggagtatagtttatcgttagtttcgggtttttacgtgtttacgcgatattttcgttagttatttttattatttatgttagtagagttgatattagtggttttggaggaagatgtttatttttaatgttggtttgttaaggttttgggttatggttttttaggatatcgtacgattaggttttcgttgggtttttttgggtttatgttttattttcgtttttatttagtttttttcggttttgggaatgtttaaagttttttttgtatattaggtttgtttgttatttttatttaggaggttgtcgtttttattttttatatttttatatttttatttaggaggttgtcgtttttattttttatatttttatatttttatttaggaggttgtcgtttttattttttatatttttatatttttatttaggaggttgtcgtttttattttttatatttttatatttttatttaggaggttgttatttttattttttatatttttggttatttagaatattttagatttttttagatttaggttatataacgatattttttatgatgttttttttggtttttggttttttttagttttttgatttcgatagtttttttgtggtgtttttacggacgttttttttggggtttagttttatttgttgtcgtttcggttgttaggttgagtattttgtcggtagggagtataagtcgtttgtggttttagtgtttatttaagcgtttataattaggagatttttagtgttcggttttgggtggaaagatataggtgagaggttgttgatcgtttttttgttttttttttaagatagggtgcgtatgttttttgtttgtttgtgtgtttggggaaaggggggagaatagggtttgttttattttgttatattatataggtgtgattgtagtaaagtcggttattttgttttttttatttttgtttttagaggtcgttttttttttagaggttggtttattttttttttggaatcgaagttagttagtgatggttttggtataaagtggtatgagggatgtttttttagttttgttttaagatcgttagaggtttggtagtttttgtttttttggaatttattgagaagtttaaggtgttttatcggagggtgaggtttttggagggaaattgaggtaatttagttaatagtcggtatagtgtttttttgggtttttgggttttattatagttaaatgttattgttcgagggattttaggtagtattttatggggtagagatgagttgtttttattgagtttcgtttagatttttggtttatagaattgttagttagggaatagtcgttagtcgttaggtgtggtagggtaaataggagttagtttagttgttagagggtaagcggtggaggggggtgaaaagggtacgttagatatttttgagtataaacgggtgttttaaagggttgtataggagttttgttgtgggggataggaggcgtgagggtaagaggaaagagtatggaagacgtagagaagtaggatagagttagtagaatataagtagaaggttaggagttgcggggtttagggcggcgttaattttggatagaggttggggttgttgagcggtaggtaaattttatttacgttatagacgtatttgttttttgagaaatacgtttttagtgaaaaagttgttgtattaattttaggatttatcggtttgagaaagaaaatgtttttttacgtagatatttaatgagttaattagatttaagatggtttttatttgaatatttttgagtgttttcgtggttgttttttgatgttagaattttaagtgtttataattttagttttttagagaataaatatcggggtgattagggtgttttggatggtttatgttaggtaggtatgggtaggattgagaagttttgataatatgatttttagttttttttattttttaaggtggtagttttttgtatatttgggagtggttttatttagtgggtttcgggtggaggaaggtttggagtttggtagtgggtgttggtttttattttttttttgtttttttgaagtagttttagtttaggggtattattttagaaggtttttttttttcgggtcggtttttttttttttgtttattattattttgttaatatttttgtaatttatagggtttttattttttaattaggtagttgttgtttggggtagtttcgttttttattttttggattttaattagaattttttttggtttttgttagtttttttttttaagtttatttgtatttcggggttaatattagtatataaaatattttttatgtttaagtatttttaatggttttttgttgtttcgagataatggtgtaaataaatattggtttaattagttagttttttataatttagttttgtttttttttttttttttatttttacgttttttattttttttaatagggtttttatatagtttttcgggatatttattcgtgtttaaagatgtttgaagtgttttttttatttttttttattttttattttttgatagttgagttaatttttatttattttgtagaagttttttgaggttcgtttttttagagagttttttcgtagtgtttttagtttggggtttgtgttttttttggtttttttcgtattttttgaggattgaaaatgttttatttagttttacgtagtttttgaggtcggatcgtttgatttttaggtttagcgttcggtaatgagaaattgttgaaggcgttttttgttgtttgatagaggttagggttttagttagttttgtttaggttgttttcgtaggttgtagtggttaaaggtggtcggtagggggttttttagagttgggtagatgtcgcgtttatgtagtaagagttttttagtttaggtttttattttttatttttttttttttgagatagagtttggttttgttgttttggttggattgtaatggcgggattttagtttattgtaatttttaatttttaggtttaagtgatttttttattttagtttttggagtagttgggattataggtatttgttattatatttgtttaatttttgtatttttagtagagatggggttttattatgttgattaggttgatttcgaatttttgattttaggtgatttttttattttcgttttttaaagtgttgggattatagatatgagttattgtgtttggttatatttttaattatttttaaaagttaaaatgagttttaaatgtttcgggcggtttttagaggttgggtaaagaggtagatatggtttttggattggatttagttggagagagtaggtaaggggggaaaaagggggtatttttaaaagtttttatttatttttaaggtttagtttaaacgtttttttgcgtttttaaagttttttttttttaggttttgggtgggtttattttttttggggtttattatcgtttgtgttgtaagttgagtttgttttagggcgagtggttttttttgtattattttttattacgtatagtttattttcgaaggcggggtttagttatttgttcgtgtgtgaggttggagtttgtagatttgagttgtttatagatcgtcgtttgttatgtgttaagtgcgttcgggttaagttttaggagtttatattataggttcgtgattaatagagacggggaattgggttatattggggattcgggggttgttgttattaagttattttttgttttattttgaataggtagttgtttatagagagatttttgttttttaggtattaagattagttaggtttgtttttattcgatttttattagggttttcgtgatgtatagttacgtttagtgttttaggatgagtgaggcgtagttatcgttttgggttagggttattttttttgttttttgtagagttggttgtggcggggttaagtgaggcggttttggggatcgggggttaggttaggatttgtttttggggaaggagggaatgtggattttttatatttaagaatttttagggtttttttacgattttagtttagttgtgatttttagattgaatgtgacgatatttatagatttattgggatttagattttggatattttttcgttttagtggttttagttgtcggttaaatggtggtttataaaatgtgtttatatattagggtttgtgaataggagtttttgcggatggaattgatggtttcgggatggggttattttgggttatttaggtgggttttaagtttatagattgtaagagattgaagaggaggtttacgtaggagttagtaggcgtagggattggagtggtatagttacgagtcgaggtcgtcggggttattagcggttggaaggggtaggaaggatttttttatgggttttttttaagagtttttggaaaaagttaattttgaggattttttgatttggggtttttggtttttaggttgtagaaggaattcgttttggatatttggtttttttttgggggttatttgttatagaagttttaggaagttgatgtcgttgtttttggattattcgagttgtcggttttttttcgtaggaggttttaggttgtttatacgtgtcgtagatttttcgtttttttagttagacggtttgtatttagtgttgcgttgagaatattatcgtttggtcgagtttaagatttagtttaaattatttagggtggtggttacgtttgtttttaggaggatatagtttagtagggtttgttggggatagggatgggtggttcggttaagttttttagtttggtttttagaatttatttattttacggggtgtgtagtcgtcggtgatcgaatttttagagtttttttttttttaggttagggtattatcggggacgagaatatttagtattgagttgtaaaggcgggttttgtggggttagttttcgtttgcgggttttgtggggttagtttagtttgtaggtttgtgggttttgtggggttagttcggtttgtaggtttttaggttttgtggggttagtttggtttgtaggtttgcgggtggggttgttttaatagtttgtttcggagaggtagtagtaagatagacggttttataagagtgtttttagtttttgagtagtttaggaaaacggtatagtagtttcgttttggggagaagtatagttttaggtgtgggattgtttattagcggaaaaggggttatttatatttcggtagggatgtgaatttttacggttttagaggaaaaatatttagtgtttttattttattatggtttagataaaataagtaggtttttaaggaaacgggtttttttgttgtgtttcggtttagagggtgagtacgcggcgttatttcggtcggttgtttgttcgtgttaaggaattttatagatagaaaggaaggtatgggttttttttttttaggtatttttaaatttagtatataatagataggataggttgtttgtgttaggataattatagtttgtagttttggttttttatacgataaaggatagggacgttgggtttatttattgtgtttagttatcgttaatttattttttagtggttttcgaagttttagtattgaatttttggtttgtcgtagggagggtttgggggtagatgggatttcgataggtgttttagttttttcgggaattattttttattttatttttcgtattagtttatagttggtataggtagcggttttgtttatttatattggttttttaattttagaggggttaaggttttttggattttggttatggtttttgttagttttaggggtcgagatttcgggttagttttgtcgtacgtgttttttgtagttggttgtgtacgtttttagttcgtggagtttgagttttattgttttgttttttttttaagggttagatgtcgtttttttaaaggttttaatagggttggtttttgttataagatttattgggtttgtttttagcgtttagcgtagaaggtggtagaacgtggtatttagatgggtttgcgttcgtgttttagttggtttttgtaggatgaggttttaggcggttagtgtggttcgtgtttttgtttgcgttttttttatttagatatatttaggttttattagagtttttattagtgtgagttaagtgtagttttttagtttttttagttttaaattaggtttataggaggtttttttgttcgtttttagttcggttaatgagtagttgtttttttagagagaagagaggaggcgttatatttttcgcggggattgtaggtttatagggtaatttggcgtatttgtatttaatatgggagaaagtggagggggttgttggaataatttgtttttgtatagtttcggcgggtattttagattttttgggtagggttgggtgtttttttgtttcgattttttttatttttttggttgagtgaggatagtttttaggtttttataggtttagaggatttaggttatttttatttacggtttggttattttattggggatattagggtagttttgggcggtttataggcggggtggttggtatgtttattaggaatttttggtttaagaatatgtttttgcggtgtttatgcgggagtttatattttttattgttaaatgcgtttgttttttgtttttttttttttatgaaatttggatatgagcggttttgaggttttgtggttttaggttttttttcgtatttttgaattttttttttttagtgaggaagagtagaggtagtcgaggttttttttcgatattttatattgaggtttttgcgggtagaggattttggatatcgagcgtggggagatttcgtttatttgtcggcgtattttggaaatgttagtaggttagtttgtaagtggggtcggtcggttcgaagttagtagtttttaggggaagtggggggtgttgttgttgtttagtgattttatatattcgtatttatagtatttatatttggtttcgtttttaaagatgaattcgtttggtacggtttcgtagcgtcggaggttagatagtttttattgtttcgtgatagtcggggggatgtttttggttaagacgaggatattattgtagaggtgtagggtagtcgggtcgttttttaatttggtgtttggagttattgttatatggaatttatgtattgcgggtaggcggggtaagagggtattacgggcgggtagggtgagaggatattacgggcgggtggggtgagagggtattacgggcgggtggggtgagagggtattacgggtaggcggggcgagagggtattatgggcgggtgaggtgagagggtatcgagggtgggcggggcgagagggtattacggttaggcggggcgagagggtattatgagaggaggtaataggggttattgtggataggtggggtgagagggtatttcgggaggaggtagtaggggtaggggttaggttggggtaggtgggggtagtcgtttaggtgttagtcggggaggtagcgacggtaggatgagtaaatggtattttttatagttacgagggggtttgggggttgtatttttttttttgttatttttttaggaattatttttgtttaggggtaaggaagttttagaggggtttgatttcggatttttatttttttttttttttattacggaggtgttagggaggatagggtagttgagtgttttggttgggtttttattttcggtatttttttaggaaggttttttttttatagttgtgtggttttattatagaaggggaaatcgaggtttagggattttttagtttttagttcgggtgtggagagtttggagtttgtatcgaggttttagtttggttacgggaattttagggtattatcggttttttttttatttaggtggttatttatttaaattttgagtatttttatggttttgtgtattggttttgtttaggtttttgtttttgaaagttttagagaggatagtggttttgaatgttgtttttattttttttgtttttttaggttagtatattaggtagatagtagtttttttattaggggttttatttgttttatttttaatttttagagttaaagggatttttgtttttattttattttttttttttttgttttttttatttgttttaagttgtggttttaggcgtatttttgttaggttacgttttattaagatgaagttgtttgggcggtgtttagcggtttttgtgttatggttttgcgttagcggatgaaggaagtagatttatgtcgttgagttaggttggagggaatttttaacgggagaattttttggaaagatgtagttttttttttttaatgttttttttttttgcgtttttttgtagagttaatcgtatttttttttattaagtttttagtttttttttttttatttaatggagtaggaggggttgttgttttggggataagattgggggagcgggatatttatttttaaggttaaagaatttagttattaagggttaggatattttaattaatattttaaaaagtaaagttatgtagagtttatgttgattaaaatagtaagtttttttgtgtttgtttttttgagatagggttttattttgtcgtttaggttagagggtagtggtataattttaggttatcgtaatttttattttttagtttttttttttttgagatggagttttattttgttgtttaggttggagtgtaatggcgcgattttagtttattgtaatttttgttttttaggtttaagcgatttttttgttttagttttttgagtagttgggattatatgtgtttattattatattaggttaatttttttatttttagtagagatggggtttcgttatgttggttaggttggtttcgaagttttgattttaggtgatttgttcgttttggttttttaaagtataaggtttataggtatgagttattgtatttggttattatttttgtatttttagtagagacgaggtttcgttacgttgtttagggtggtttggtttttattttttgggtttaggtgatttatttattttagtttttcgaagtattggaattataggtatgagttatcgtgtttagtttaaaatagtaagtttttaaagggagggtagttgtggttgttgggattattgggtgggtgttagggtaggattaggatttaatttagtggatattttattgttttgtttattatggggttttggtattgattttggttttttaggagatgtaggattatgtttgttttgtcgttgagtgtttagggttttattattatttatttttgtttatagttttagggtagtttagtttttagaggtttttaggtatttattcgaagtttttgtagggttgggattgacgttttattttttttagggttagttttataggggagtatttttttttttttttttttttttttttttatttttttttttttttttattttgttttggggggaagttggggtgggatcgtttagtttggggtttttttttttagttaggttttgggttttattgtttagtgtaggaagtaaagggtagggttttgggaagttacgtttttttaaaggttattagtttgggttaaaggttttagttgtaattaacggttaggttagggagttttaaagatattatagtttagtagatttttttttttaaattttcgtgggtatttttaggttggagtttagtttattttaaggtatttatgaatgttttatttttttgtacggttttttggagtcgtttttatttttgtagtttacgttggtgaggggtttcggtatatttgaacggggagttttcgttcggtttcggttttcgttatttattttcgtcgagcgtatagcggattcgggtattttacgtatatatggtttcgtggttgttaaagtttagtatgatggtttgggataggtagataatggttagcgtgtggattaagttttcgtagggtaggtcgggttttagttcgtagatgttttttagcgttaggttgttgcgttttcgtaggtttttgatacgtttcgatttgtttttgtagattagtattagtaggtagtttgtaaggagcgtggtcgttagggacgttagttaatatcgtttgttcgtatttttggcgttttcggggaggtcgtgatagtgtagagattcgggttggggttatgattttaagttagttatttagttatgttaaggtttcgattttcggtatataaaatggggcgattttttttttttgtaagatttataggttgtaagagcggaaatgaatttagaatatttatgtttgtgtttagttttcgacgttggtttttatgattgggttttggatttttattggcggatttgttttgttttaggttttggagttttttgggttatattgagggttgtaggatttgtggttacgggtttgggggtttagcgtggggtttgttcggtggttgtggttttttgttttggttttgttagttcgtttttattttgtcgttttgttagttatatttgtgtttattttttgttgtttcgagatttatcgttttttttggtttttttagtttttaggttgtggttgagttttagttttagggggtaggggaggtcgatgggttttgggttttatttttatttattcggttattgtttagtatagtaggttttagtttttttttcggttgttggggatttgtttgcgttttgtttttcggattttttagggtaattcgggttttcgtttttatttttatttttttattttttaacgttattgttattataggtaatcggttggtgttgtttattttattaggtgtagtttaaatttggtatagtatagtttttgtgtggttttgggtaaattatttggttcggggatatttttgtgaatggcgggggtagtaggtttgtttgagagagtagagaggacggcgtaggaagattttcggttttttcggtatggttttaggtttgatgattaggtttttttttatttaggtttcggtagttgggttttaggatattcggtttcggcgagggtgtaggttttgggattttatataaatattttaaatttttgtgagtatgtaggaggggattggggagaatgttttcgaagaggattgtagaatgacgtgttatttgaagttttgaaaagtaggtgtttattttttatataggttttgtaaagttacgtgagaattaaaattttaaatgaatttgacgtagatatttatttttgtaatggagtttagagtagatatggtgtttagtttttttttttagtcgtgtttattttttcgggttatatggttatagttcgtagagttagggggtttgtgtgattataggggttagcggttagtaagttttttttgtaaggggttagagggtaagtatgtagtttttagggttatataggttttgcggttattatttagtatcgttatttttgttgcgtgaaagtagttttagattttgtgtagatttttgggcgtagttgtatgttaggaagtttgatttataaaagtaaggcgtggtgtgggcgcggcgatagtgcgtttattttttattggaggatttgttcgtagcgtttgaaacgtttatagttagaaaaaagttaggtatttttaatttgagaaagaagtttttttattttcgtatttatagaatttcgtttgtttagttgaggttttttagataattttttggttttttttggaaattttaaggtaggaagtaggacgttcggttttaagagagaaattaaatatagcggcgtaatcggaattcgtcgtaatagtaatgttttttaaatgcgttattagagtatttaagaaatgacggtgtgtgggaatagtatgaatacgggtggtttcgcgtaggacgggggttttagggtcgtttgagtcggaggatagttcgtagtttttatcgtttgtagttgaagtgtgttgtgagatcgttgtaggggttcgggttatttttgttttgggggattttaaaaagttgagttatatttatgttgaaatttttattgaggataattacgtattatatagattatttttttattttttttttttaaggggtaaggtttttgggaatttttgttttgattttttagttgtatggttttgggattttggttttagtttttttatttgtgatttggggatagtggtatttttatttgtagtaatgtcgtaaggattatttgtaggaaggtgtggaggttttgtgtgtagtaagtatttaatatatgtttgtatatttaggtatatatttgtttgcgttattagttataaggttagagcgttttttttgtaatttggttgtttatgtatagagggattaggtgatttatggtttatttttagtgtttagtaaggggtatatattggttaattatttattattttttatttcgagggttttagttttttcggagttttggtgggttgattatttagaagttaggtagggatttttttttttttgtggttttgttttgtggtggtggtattttggttatattttggtagatagtttcggtatttgataataattagttttttttattgtttttaattagtattttttttgtttaataagttatatttttaataatatagttaggattggggttaggagtttgtttgtaaagagttcgacgttatttttttggtttgattgagtttaaagttttttttattatatttagttggaaagtagttatagatgatacgtgtgggaatggttgcgagttaataaaattttatttataaaaataggtttcggtaggatttggtttagagattatagtgagtcgatttttggttaagagttgaatttgttacgacggttttttatattttttataagttagtcggttttattttagatttttatttttgtaaggttggtggtggggcgtatgttgaatttacgttcgatttttagatttttttttgatttacggacgttatttttcggtttgtttgatttttttggattttgtttataaatgtagatttatattttgtattttgggaacgtttgaaaatttaggagtatttataggtaggggttgagcgtggtttttagtaagacgtgtttattttcgatttcggaatttgtatgtttttatttgggaatagggtttttgtatatgtaatcgagtttaggattttggattgtttgaacgtagtagtaagtgtttttgtaagggggagaataggaggcgtagatatagggaaggttatttgaatggggacggaggtagggattggagcgttgaggttatagttaagggatatttgtgtttaataggagttgggagaggtaggaaggagtttttttgggaagtttggagggagcgtggttttacgggtttttcgattgtagagttttaatttttaggatttagtgggtgaatttttattgtttgaaggtttagttgtggtgtttttttttgtcggttataggaaattgacgattatttaaattatcgattttatttttaaatatgaatagaagtcgagaggttagagttgggggttcgttcgttttttttgtttggtagaagttttttcggtagttgacgtttatttttttacgtttaggtcgttttttttttattattaataataaatcgattttgtttttaaagtgtatttttcggggagtgttagggggtaaagcgttgtaggaattggtattagagagatggaagttttaggtttagggttgagattaagttaggttaaggtcgggatattagagttttaggacgtagcggttttttttgggatatagtacgtgtgtcgggtagatataggtttgggggatttaggagtggatggttattggttagtttttcgggcgttaggtttagagggttttagttatatttttttaggaggtttgggtatttgggagttttttatttagcggttgaggaagtattatcggttttgtttatttatttttcggttgggggttttttgtttggcggttgaggaattattattagttttgtttatttattttttggttgcgggtattggttgtaatttggttagggaaggtttttgtagaatttggagggttttcggggttttggtaggtagtattgggttgggtggagggtatcgggtcgtgatgttgaaaggagataaacgaggaagaggtattaggagaggttaaggtatagagatt

SEQ ID NO: 187 - DNA, 2031 bp, Artificial Sequence
  chemically treated genomic DNA (Homo sapiens)
ttttatcggacgttattgtatatgcgttttgtttgtagttgatgatgtagttatagggtaagtgggtttagcgtttggataagataaatattggggttatagtggtggttagtagggtaagtagaaagttgaatgtttttaagggaaggttttgaaattttacgacgttttggattattatgtgtatttgtaagggtaagagaattttagatttaatttaaaattatattttgtattttttaagttttttttttacgtacgttgttttagttttttttttagtttttttttttgatggatagcggggatttttgttacggagttggttttttgtttttggtgatgggtttttgggaacggcggggtatatttttagggttgggaggggttttagtttttgagtgtcggatttgcgttcgttgtttatttaagattttattagaaaggtatagtttataacgtgggggacgttagttaggaaataggcgttcgtgaaattcgtatttgatttttcgaatggtttttgtcgtttttttggatttttattttcgtttatgcgcgttcgttatagtggggcgttattttgttattttttaatcggtttttttttggaaggaggaataaaagtttgttttgttttttgttttttttttttataattgatttttttttttttttatttcgttttgttggagatgggcgtcgttttttttaggcgggaatggaacggcgagaaagggatgatagaaggttgtggggaaaaaattttttaattttttttttttttttttgaatattttttgattttgttgtgtgagataatatttttggttattatcgatatggaaaattaagtcgttcgcgacggaaagcgatttttatgtttttgatttttgaaaggagaagtatttagtagtaaaggtttcgtagttaattagttttgtttcgaattgtttttttttaagtgtatgtttaaaatttagcgagatatatttggaagcggattttattgtgtgttttttggtgattttttaaatcggcgacgtcggttttaatatttatttatattgtttggtatatatattcgcgttttgtgagtaattgtatttttattattatgggtagttaaaggacgatttttgtaagcgttaggattaaagcgaagcgtttttgcgttacgtttacggtgaagtttttggtgttatagagagtttttcggtttttacgtttgtaggttttagttttagcggtagcgggcgtattcggttcgaatacggtgtcggagttcggagagtattttttagagcgtcgtagattcgggtttggagtattttttggggatagggaaattatttttttcgtagtaggaggggttttaggaattgaagttttacgggaaattttttggtagttggagtggagtttcggcggttttttcgaatatagtaatcggtgagtgagtgggattgagaggtttacgaggagttcgaaggttaaagcgtatacgatagagaggaatagtacgtaggagttggagtagtttattaggtagttttagggcgtgcgtacgaaggcgttttagtcgtatagcgggagcgtcgagagtagtagattggttgtttatacggttagtattacgtcgagtatttggttcgattttttggaggttgtttggttttttatatttttgtgtatcgtataaaagttgtaagagattaggagagtcgtttttaagttgttagagaggttttggtataaatatattaaggtagaggtggtgtatagaaattggaagtaatcggggatttcgtttggttattgtaaaaatatgaagatggttatcgataggacgtttatgagattatttatagattaggaagttataagtatggatataatagttttgttttgtatttttagtagggaaattagtgaataaatgttgtttattaaggttgtaaaagttatgagatatgttaagtaaaaaagatagatatttagggtttttggcggatttaaaaggttcgtaga

SEQ ID NO: 188 - DNA, 2031 bp, Artificial Sequence
  chemically treated genomic DNA (Homo sapiens)
tttacggattttttaaattcgttaggaattttgaatatttattttttttgtttgatatgttttatgatttttgtagttttggtgggtagtatttatttattaatttttttgttgaaaatgtagaatagaattgttgtgtttatgtttgtggttttttggtttgtggatgattttatgagcgttttgtcggtgattatttttatgtttttgtagtggttaaacgaggttttcggttatttttaatttttgtgtattatttttgttttaatgtatttatgttagggtttttttagtaatttgaaggcgatttttttagttttttataatttttatacgatgtatagaggtgtggggagttagatagtttttagaagatcgggttaggtgttcggcgtggtgttgatcgtgtgggtagttagtttgttgttttcggcgttttcgttgtgcggttggggcgttttcgtgcgtacgttttggggttgtttggtggattgttttagtttttacgtattatttttttttatcgtgtacgttttggttttcggatttttcgtgggttttttagttttatttatttatcgattgttgtgttcggaggagtcgtcgagattttattttaattattaggaaatttttcgtggagttttaatttttgggattttttttattgcggggagagtggtttttttgtttttagaggatgttttaggttcgagtttgcggcgttttgggggatgtttttcgagtttcgatatcgtgttcggatcgggtgcgttcgttgtcgttggggttgaagtttgtaggcgtgagaatcgggggattttttatggtattaggagttttatcgtgagcgtagcgtagaagcgtttcgttttgattttagcgtttataaaagtcgttttttggttgtttatgatggtaaaagtgtagttgtttataaagcgcgagtgtgtgtgttagatagtgtaaatgagtgttgggatcggcgtcgtcggtttggggagttattaagagatatatagtgaagttcgtttttaagtgtatttcgttgggttttagatatgtatttagaagaaggtagttcgggatagggttagttggttgcgaaatttttattattaaatgtttttttttttaaaagttaggggtatggggatcgtttttcgtcgcgagcgatttagttttttatatcggtggtggttaaggatattgttttatatagtaaaattagagagtatttagaaaaggaaagagggaattaaaaggttttttttttataattttttgttatttttttttcgtcgttttattttcgtttagagaggacgacgtttatttttagtagggcgggatagaggggaggagagattagttgtggagggagaagatagggaataaaataggtttttgtttttttttttaggaggaagtcgattaagaggtggtagagtggcgttttattgtgacgagcgcgtatgggcggaggtgagggtttagggaggcgataaaggttattcggagaattagatgcgggttttacggacgtttgttttttagttagcgttttttacgttgtagattgtgtttttttggtggagttttgaataggtagcgggcgtagattcggtatttaaaagttgaaattttttttaattttgggggtgtgtttcgtcgtttttaggagtttattattaaggatagggagttagtttcgtagtagaggttttcgttgtttattaggagaaggaattggaaagggaattgaggtagcgtgcgtggagaaaaggtttgagaagtataaagtataattttaggttaggtttgaagtttttttgtttttgtagatgtatatggtggtttagaacgtcgtggggttttagagtttttttttggagatatttagttttttatttattttgttggttattattgtaattttagtgtttgttttgtttaaacgttggatttatttgttttgtggttgtattattaattgtaggtagaacgtatatgtagtggcgttcgatggga

SEQ ID NO: 189 - DNA, 2237 bp, Artificial Sequence
  chemically treated genomic DNA (Homo sapiens)
gtttgtgatagacgtttgtaggtatatggtaaggaaaatagattaaaatattaagaaatagtaagaggtcggatcgagggttttttatttgtatgggaaattttatttcgtttattatttttagaaataaaaaggaaaacgattttaaagatataggttaaaggtcgaaggggtgtagaattatttttcgtttttttttttttattttttttaaatattttagaacgagttaaatttttcgaatttcgtagtatagataataagtaatttagtaagattggacggggatgattgagggttaatttattataggattataggaaattttttagttttaaattcgaatgtattcgtgattatggtaatattttttatttgattaaaagttattaaacgttttgataagtgtttatagttgttttttcgattattgaagtggttttgaaaagagtttttggggttaggtggttgatttattgcgttttttgtatatttttatttcgagttggtgtatttggtgatcgttttggtgttttcggatacggcgtgtttggttagttcgtcgggtagtagtaggcgtacggtcgtttggatttcgcgggatgtgatggtggagcgtttgttgtagtgcgttaggcgggacgtttttttcgcgatgcgttcgaagatgtcgttgacgaaggagtttatgatgtttatggttttggacgagatgtcggtgtcggggtggatttgttttagtattttgtatacgtaaacggagtagttttttttgcggttgcgtttgcgttttttgtcgttttttttttgtattttcgtaatagtttttttggagttttttttgggagtaggagcggatttcgttggattcggtatttttgcgcgaaaaaagagaaaagagatttaaagaagtaattcgaattatcgtaaaacgggttggttatgcgttatttatagagttcgtatgtaaatgaagattcgtaaagtgttgcgtttttattggttaatttataacggtgtcgttagagggggtggagtttatgtaaataatagattttagttttgtttttttaatggttattgtaataaaagttttgttattttattagaatggtttattttatattaattagttttaagttaggtgaagcgatagtttttacggtttggggtttttttttggtttttattttttattagatttgtatacggaagaaattttaacgttagttagataagttaatttttttgtttcgtttttgtatttttattttatattttgtggaaattttttttttttttttgaaatattattttatttatttttaaaaatcgttagatatttattttcgttcgtttaaattattattttggtttggatatcgtttgtagtatgtaatgaggaagatgttgagttttaattaagtttatagtttttaaataaattaggaaacgggtttataatttttaagggattcgttttatttttatatttaggattttttatatttagaaattttttatagttttttgtttttatgtaaaattttatttatagaattgggagtcggatttttagttttaaattagcgtgaaaacgttcggtcggaattataaggattatgtttttgcggttttttttattgtcggttaatttacggttgggttttgggttttgtaacgttatttattacgagtgtttttggtttttgatcgttgcgtaaggtagacgtatattagatggagagtcggtatagttgtttttgatgaaaacggtagtggttttgaaaagagtttttagatcgattatttaaaaatatgttttaggttcgtttttcgcggatgcggcgggttaattggatgtttttgggtatgatggttacgcgtttggtatggatggcgtataggttcgtgttttcgaatagttttattaggtaggtttcgttggttttttgtagcgttattacggtcgagttttggaagcgtaggttcgttttaaagttttgcgcgatttcgcgtattagtcgttggaagggtagtttgcggattagtagtttcgtagatttttggtagcgtcggatttttcgtagagttacggtgtcgggtcggtagcggtgcggtttttttatttcgttcgtggtcggcgcgtttttgcgggtcgttttggtagttagttgttttttcggggttttgtcgtcggtcgatttgcgggtagtttgtttagtacgggttatgtt

SEQ ID NO: 190 - DNA, 2237 bp, Artificial Sequence
  chemically treated genomic DNA (Homo sapiens)
agtatggttcgtattaagtagattgttcgtaagtcgatcggcggtaaggtttcgaggaagtagttggttattaaagcggttcgtaagagcgcgtcggttacgggcggggtgaagaagtcgtatcgttatcggttcggtatcgtggttttgcgggagattcggcgttattagaagtttacggagttgttgattcgtaagttgtttttttagcggttggtacgcgagatcgcgtaggattttaagacggatttgcgtttttagagttcggtcgtgatggcgttgtaggaggttagcgaggtttatttggtggggttgttcgaagatacgaatttgtgcgttatttatgttaagcgcgtgattattatgtttaaggatatttagttggttcgtcgtattcgcggggagcgggtttaaggtatatttttaagtggtcgatttaaaggttttttttagagttattgtcgtttttattaagagtagttgtatcggttttttatttgatgtgcgtttgttttgcgtagcggttaggggttaggggtattcgtggtgggtgacgttatagaatttaaagtttagtcgtgagttggtcggtagtagagaaagtcgtagaggtatggtttttgtggtttcggtcgagcgtttttacgttggtttaaggttagaggttcggtttttaattttgtgggtaaagttttgtatgggggtaagagattatggggagtttttagatgtggaagattttgagtgtaagggtggggcgagttttttaaaaattataaattcgttttttggtttatttaggaattataagtttaattaaagtttagtattttttttattgtatattataggcggtgtttaagttagaatagtaatttaagcgggcgggagtaaatatttggcgatttttaaaaatgggtgaggtagtattttaaggaagagaaaaaaatttttataaagtatagaataaaaatgtaaaaacgaggtaagagagttaatttgtttagttggcgttaagatttttttcgtatgtaagtttaatggaaagtgaaaattaagaaaaaattttaagtcgtagaaattatcgttttatttagtttaaaattggttagtgtgaaatggattattttgataggataataagatttttgttatagtgattattaaggaagtaagattagaatttattatttatatagattttattttttttgacgatatcgttgtaagttaattaatgaaagcgtagtattttgcgagtttttatttgtatacgggttttataagtagcgtataattagttcgttttgcggtagttcggattatttttttaagtttttttttttttttttcgcgtaaaaatgtcggatttagcgaaattcgtttttgtttttaagaagggttttaaaaaggttgttacgaaagtgtagaagaaggacggtaagaagcgtaagcgtagtcgtaaggagagttatttcgtttacgtgtataaggtgttgaagtaggtttatttcgatatcggtatttcgtttaaggttatgggtattatgaattttttcgttaacgatattttcgagcgtatcgcgggagaggcgtttcgtttggcgtattataataagcgttttattattatatttcgcgagatttagacggtcgtgcgtttgttgttgttcggcgagttggttaagtacgtcgtgttcgagggtattaaggcggttattaagtatattagttcgaagtaagagtgtgtaagggacgtaatagattaattatttaattttaaaggttttttttagagttattttagtaatcgagaaagtagttgtaaatatttgttagagcgtttgatagtttttggttaggtagggagtgttattatggttacggatgtattcgggtttaggattaaggagttttttgtagttttgtaatgagttggtttttagttattttcgtttagttttattgagttgtttgttatttgtgttacgagattcgaaaggtttgattcgttttgggatatttgggagggatggagggaaggaggcggggggtggttttatattttttcggtttttaatttgtatttttaaagtcgtttttttttttgtttttgaaagtaatgaacgagatgagattttttatatagatgagaaattttcggttcgattttttattattttttagtgttttaatttgttttttttattatatatttataggcgtttgttataaat

SEQ ID NO: 191 - DNA, 4182 bp, Artificial Sequence
  chemically treated genomic DNA (Homo sapiens)
agattttttgaacgtttgatgaaatggatttttgtgaaaattaatagtgaatatttattgttgtattgtacgaagtttttgaaatgtaattaaaagtttttattgagttttcgagttttggtttgcgcgtattttttcggtcgcggatattttatcgcgtagagtttcgttttttcgttgtttttagttttcgatgattttttcgttttcgttttgttcggtgatagacgttttattgtttttaatcggaggtatttttcgcgggagcggttaatcgggagtttcggtaggcggggaggtcgggttagttagatttggaggtttaattttaatatggtcgaagtaagtagcgttaatttaggtagcggttgtgaggaaaaaaggtatgaggggtcgttttcggaatttgtgttattcggtattattatttcgagggtgaagtttttcgatattatggtggatatttttttttagaagttggtcgtcgtcggtaggtaaagtggacgtagtcgcggtgggagtgtttgttggtatcgaagtttaaatttcgcgaggttaggacggtcgtaggttggcgcgcggtgacgtgggttcgcgttgggggcggggtagtcggacgaggcgatttagttaaattttgagttttaggagttagggtatttacgtattgataatttgtagcggatcgggatagttagttatttttttttataggaagtttcgtttttattaaaattttaggtggttgggaggaaagatagagtttttgtaaattagagtagggttttttatttttttattatttttgagatagggttttgcgttgtcgtttaggttggagtgtagtggcgtgattattgtagattcgattttttgggtttaagcgatttttttgtcgtagttttttaagtagtcgggattataggttcgtgttttcgcgttcggttatagattagggtttaagtcgcggtttattattatgtgagtaagacgtaagttttttttttttcgtcggttttttgttagttaagtgatagtaatagtattttttttatagggtcgttttgagaattaaatgagtaaatatatttaaggcgtttaggataggatttgatatatagaaagatttgttagttattatgagaatattttttttattgggagattgttaggattaaatgtgttattatgaaaagaaatattttttttgtttcgatttttattttatttatttttatttttattttttgagacggagtttcgttttgtcgtttaggttggagtagtggcgcgattttggtttattgtaattttcgtttttcgggtttaaaggatttttttgttttagttttttaagtagttgggattataggtgtatattattatattcggttaattttttgtatttgtattagtagagacgaggttttattatgttggttaggttggtttggaatttttgatttcgtgatttatttatttcggttttttaaagtattaggattataggcgtgagttatcgcgttcggtttttatttttatataatttatatgattcgagagttttgtttatgattttattattttagtatattagtgttgaaacgtttttaggagttcggtgttttgattatagtttttttttttttagttttttttatttttatttttttgttttttggttttattaggatttttatttgtttttagtttattttttttgggtttagtattttattttttttacgtataattaatgatttgtttttatttatgatttattaaatatttgagtgttagttggggatattatgaggtagataaggttttttgtttttttggagtttgtatttaatgcgtagagacgttaataatattattatataggttggtaagatagtaaggttattattatgtgttaatagtgatttatgtttgtaattttcgtgttttgggaggttgaggtaggaggattatttgagtttggaagtttgaggtttcggtgagttataatagttttattgtattttagtttaggtgatagagtaagattttgtttttaaaaaagaaaaaaaaaaaagataatgaataggtaatgatattattagataggatgtttggggcgtttattttgagatggtattttagttggaatttgaaggatgagaaggaattagattattattattattattattattattttttttttttaggtagtgtttagttttgttgtttaggttggagtgtagtggttcgatttcggtttattgtagtttttatttgtcgggtttaagtgattttttttttttagtttttcgagtagttgagattataggtgtttgttattacggttagttaatttttgtattttttagtagagatagggttttattatgttggttaggttggtttcgaattgagtttaagcgatttatttatttttgttttttaaagtgttgggattataggtatgagttattgtatttaggcggaattatttttttgaagaattatagaacgaatgtataggaaaaggggatagtttgtgtaaagtttttgaggtgattagatattttaggaattggtagagatttttttggttatagtatagtgattagagtaaaatgagatgaggttggagaggtaggtaatagttttattatgtagggtttagtttgttataataatgaatttgataaaataatttgtaattatttttatgaattaattatggtacgttattattatatgttttggtacggttttttttttgttgtatttatttttttttatttatttttgtttttgtttttttttttatagtttttatttttttttagttatatgtttttttatttatttatttatttatttatttttattttttttagagatgaggttttgttgtgttgtttaagttgattttaagttttgaggtttaagtgatttttttattttagttttttagagtgttaggattataggtatgagttatagtgttcgttttatttatttatttatgagatagggttttgttttgttgtttaggttggagtgtaatggtataatttaggtttattgtaatttttgttttttgggtttaagcgatttttttgttttagtttttcgagtggttgggattataggtatgtattattatgtttagttaattttcgtatttttagtagagatggggttttgttatgttggttaggttggtgttgaatttttgattttaggtgattcgtttgtttcggttatttatttataatataaatatttattgattattgatagtgttaataaatttgttttagttttagtagggttttagttgttggagataaggtagtgattaagatggataaggttttaatttttttggagtagatattttggtattattaaaaaaaaataaaattgagtttggcgtagtggtttatatttgtaattttagtattttgagaggtagaggcgggtggattatttgaggttagaagttcgagattagtttggttaatgtagcgaaattttatttttattataaatataaaaattagtcgggtttagtggcgtatgtttgtaattttagttattcgggaggttgaagtaggagaatcgtttgaatttgggaagcggaggttttagtgagttaagattttattattgtattttagtttgggtaatagagtgagattttattttaaaaaaataaataaaataaaataaaattagtgtaaaggaatagagagtagttgatacgttgttttttggcgatttgtcgttggagaggttgggattttggatgcgtgcggggttttggtttatcggtgattcggttagtcggtcgtgtttttgtttgagtcgtttgttggggttcgcgggtttgttgatttttcgcgcgttcgagcgtttcgattttcggtgtcggttcgggttcgggtttttgatttattcgggggcggcggggaaggcggcgagggttattttgttttcgtgcgtttttcgttgcgggcgttcggggcggtcgcgataattttattttattggtttcgtgtcgtgcgtgttaggcgttttcgttttcgttgggttgttcgtcgtttttttttcggagtggggagttggttagggtcgatcgattcgttggtcggtcggttcgttttcgttttcggggggttt

SEQ ID NO: 192 - DNA, 4182 bp, Artificial Sequence
  chemically treated genomic DNA (Homo sapiens)
gagtttttcgggagcggaggcgggtcggtcggttagcgagtcgatcggttttggttaattttttatttcggggaaggggcggcggataatttagcggagacgagaacgtttgatacgtacggtacggagttagtggggtggggttgtcgcggtcgtttcgggcgttcgtagcggagagcgtacgggggtagggtagttttcgtcgtttttttcgtcgttttcgggtgggttagagattcggattcgggtcggtatcgggagtcgggacgttcggacgcgcgagagattagtaggttcgcgggttttagtaggcggtttaagtaggagtacggtcggttagtcgggttatcggtaggttagagtttcgtacgtatttagagttttaatttttttagcgataggtcgttagaggatagcgtgttagttgttttttatttttttatattgattttattttattttatttatttttttgagatagagttttattttgttgtttaggttagaatgtaatggtgggattttggtttattgaaattttcgttttttaggtttaagcgatttttttgttttagtttttcgagtagttgggattataggtatgcgttattaggttcggttaatttttatatttgtagtagagatggggtttcgttatattggttaggttggtttcgaatttttgattttaagtgatttattcgtttttgttttttaaagtgttgggattataggtgtgagttattgcgttaggtttaattttatttttttttaatggtattagaatgtttattttaagaagattggaattttgtttattttgattattgttttatttttagtaattagaattttattagaattagaataaatttattgatattgttaatggttagtaaatatttgtgttataaataagtggtcgaggtaggcggattatttgaggttaggagtttaatattagtttggttaatatggtaaaattttatttttattaaaaatacgaaaattagttgggtatggtggtgtatgtttgtaattttagttattcgggaggttgagataggagaatcgtttgaatttaagaggtaggggttgtagtgagtttagattgtgttattatattttaatttgagtaatagagtaagattttgttttataaataaataaatgggacgggtattgtggtttatgtttgtaattttagtattttgggaggttgaggtgggaggattatttgagttttagagtttgagattagtttgggtaatatagtaagattttatttttaaaagaaataaaaataaataaataaataaataaatggggggatatataattaagagaaagtggggattatgggaggggagataagggtaagaatgagtagggaaaaataaatataataggggagggatcgtgttaggatatatgatgatgacgtgttatgattggtttataaaagtgattataaattattttattaaatttattattatggtaaattaggttttgtatgataaggttgttatttgtttttttagttttattttattttattttgattattatgttgtagttaagaaggtttttgttagtttttggaatatttgattattttagggattttgtataggttgttttttttttttatatattcgttttgtaattttttaaaaaggtggtttcgtttgggtgtagtggtttatgtttgtaattttagtattttgggaggtagaggtgagtggatcgtttgagtttagttcgagattagtttggttaatatggtgaaattttgtttttattaaaaaatataaaaattagttggtcgtggtagtaggtatttgtaattttaattattcgggaggttgagggaggagaattatttgaattcggtaggtggagattatagtgagtcgagatcgagttattgtattttagtttgggtaatagagttagatattgtttaaaaaaaaaaaataataataataataataataataatttggtttttttttattttttaagttttagttgaaatgttattttagaatgggcgttttaagtattttatttagtggtattattatttgtttattatttttttttttttttttttttagaggtagggttttgttttgttatttaggttggagtgtaatggggttgttataatttatcgaagttttaaatttttaggtttaaatgatttttttgttttagttttttaaagtacggggattataggtatgagttattgttgatatataataatggttttattattttattagtttatgtgatgatgttgttggcgtttttacgtattgaatgtaagttttaaaaagataagaggttttgtttgttttatggtatttttagttgatatttaaatatttgatgagttatgagtgaagataaattattaattatgcgtaggaaaggtaaagtgttgaatttaggaggaatggattgggaatagatgagagttttgatgaagttaaagaatagggaagtggggatagagagggttagagaaggagaggttgtggttagggtatcgaatttttggaagcgttttaatattgatgtgttggggtggtgggattatgggtaaaattttcgagttatataaattatataaaagtgaaggtcgggcgcggtggtttacgtttgtaattttggtattttgggaggtcgaggtgggtggattacgaggttaggagttttagattagtttggttaatatggtgaaatttcgtttttattagtatagatataaaaaattagtcgggtgtggtagtgtgtatttgtaattttagttatttgggaggttgaggtaggggaattttttgaattcgggagacggaggttgtaatgagttaagatcgcgttattgttttagtttgggcgataggacgagatttcgttttaaaaaataaaaataaaaataaataaaataaaagtcgagataggaaaaatgtttttttttatggtaatatatttagttttggtaattttttagtgaagaagatatttttataatagttaataaatttttttatgtgttaggttttgttttaggcgttttaggtgtatttatttatttaatttttaaaacgattttatgagaaaggtattattgttgttatttgattgataagaagtcgacgagggagagggggtttacgttttgtttatatagtggtgggtcgcgatttaaattttgatttgtagtcgggcgcgggagtacgagtttgtagtttcggttatttgggaagttgcggtaggaagatcgtttgagtttaggaggtcgagtttgtagtgattacgttattgtattttagtttgggcgataacgtaaggttttattttaaagataataaaaaaataaaaaattttgttttaatttgtaaaggttttatttttttttttaattatttgaaattttagtgaaaacggggttttttgtaggaaggagtagttagttatttcggttcgttataggttattagtgcgtgaatattttgatttttaaggtttaggatttgattgggtcgtttcgttcgattgtttcgtttttaacgcggatttacgttatcgcgcgttagtttgcggtcgttttgatttcgcgggatttgagtttcggtgttaataaatatttttatcgcggttgcgtttattttatttgtcggcggcgattagtttttgaagaaaagtgtttattatggtgtcgaggagttttattttcgaaatggtagtgtcgggtggtatagatttcgaagacgattttttatgttttttttttttatagtcgttgtttagattggcgttatttgtttcggttatgttgaagttgaatttttaaatttaattggttcggttttttcgtttgtcggagttttcgattggtcgttttcgcgaagggtgttttcgattggaagtagtagaacgtttgttatcgagtagggcgggggcggggaagttatcggaggttgagggtagcggggaggcgaggttttgcgcggtgggatgttcgcgatcggaaaaatacgcgtaagttaaagttcgggggtttaataaaaatttttaattatattttagagatttcgtatagtgtaatagtgaatatttattgttaatttttataagagtttattttattaaacgtttagagagttt

SEQ ID NO: 193 - DNA, 7572 bp, Artificial Sequence
  chemically treated genomic DNA (Homo sapiens)
tgtatgagtatggatgttatgagggtatttagtgagtgggaagggagttgttttatatgtttttatattgatttgtaaaattgttttgaaagggtatttttagatttatttgttttaaatgtagtaaaatttatttgatattgtttataatgtatgtatgggttattttatatgtaatagttattgtattaattaatttagttgatattgagatggtgaatggggtgggggagtagggaggaatatgttgtgtatgaaaaattttgggtgtaaaagttaatgtagaatttattttttgaggaattgaaaaagatatttatgatttttaagtggagagaggatagaaagttaagtggtgggggttgtgattagtgattgggattttagtttgattttagtatttagtggaataggattataatttaaagaaatgagttttttttggagtaaagagtggttttgattttaaagtagaaaaaataaattgtttgggggtggaagatggtgaggggtggggggtggggagggaggtgggttgtggtgttggttttggggtttgtggtatggttttttttgttgtgttgtttagggtttggattttgtttggtgttgtgtttattgtgagggtgttagatttgttgtgttgttgttgtgtttttttagttgtggtttttttttttgttgtttttttttgtttttttagtttttttttttatgtgtggatgatgttaaaattttgtgaaaaagttgtgtggtggttttttgagtggaggtgtgattttgttgtttagtggtttttttttgggggtgtttggagggggagaagggtggaggtggttggttttttttttttttgggaggtaggattttttgatgttgattgttggatgttttttgttttaaagtttattggaaaatttatttttgtaaagtaaatgtatttttagagttatttttggttgtgtgaggtgtgttttaagttgaattagataggaagagggggaagtttgggttttttaattttttttttttttgaagggaggggagtgagatgttaggtgggtgatagatggtaggtgtttgtttttttaatttatgtttgttgtatttgttgttttagtaatttagttttgtttaagttgaaatttgttgaagggagtgtggatgtataggtttggtggattttgtttttttttagaatgtagtggtttagtgttttggtgggtgtggttgtgattagagggttttggaagtgagtgaatatttgtaattgtattgtttgtttttatttattttgtttttttgtgttttttgttttttgatgttttttttttttttttgtttgtatttttttattttgtttgtattttttttttttttttgatgtgttttttatgtgtttttttggatttatgtgtttttttgtattttgttagttgggtttttggttttgattgattgtttatttttttatggagaaatataaatatagttttattttttgggggagttgaggggaaggtagtggtttttatttttgagtttgaatttagttattatttgttttttatttggtttaggtgtttttgtgtggagaaggtgggatttgaatttgtgttgtttttgggttttgagttgattgtggaattatttggttgggaggtattttttaggtaagtttgggagtatgtgtgtttagtgttgtaggtttttgtagaaaagtgtttataaatatttaatattttgttgtattttttatttttaggttttgtatattttttaattgaaattttaaaatgttagtgtagagggtggggagttggttggaaaaagaataaaagtttaataaaattggtgtttgttaaagtttattattagttttatatgggatatatatatatgtatttttttttttgtgaagggtgaaaaggagataaggaagaattaataatttatttttttttgttgttttttatttttgtgttatggtgattagtttggattttaaagttagagtataggtttttgtgtttttttttgaaattgaagtttatattgaaagaaagtgtgtatttttgtttagaaggtaatatgtgtttttttgtgtgttaggtggagtgtattttaataagatattagggttttaatatatggttggagtggtgattaaaagggaaaatttagtttttagtttaagttttttagagatatttttgttaatttttgtatttttttatgttttattttatgtgtgagagtttgtaaaattattggggattggatttgatggtgagttttatgtttgggaatagttagtaattggaaggggaagtggataggggaattttaagaggtgagtttgttatgtgggaagtgtttgaatttgtgggtttttatgaatgtagagggtgttgggaagggggggtatttggttgtgattttttttgttttttttatttgttgtttttttttttgttggaatttttttgtaaagtaagatggagtagggggagggggagagggaaggggtgagagggtttttggtttatttttgagatgtgaggatttgttatttaggtattttttttggggtgggttgggttttgggatgattatttgttttttttttgtttttgttgtttttattttgggagatttagagttttggatgtttttttttggagaagggggggtgtgtggagttggggtggaagagattttgtttgtagagttatattaagtgatgtttagaggttgggagttttggtggtttttgttttttgtttgttgggttagatttatattttaaaaatattttttgtttttttttttttttttgtttttttttgttgtaattttttttgatttgtttaaaggtggtttaggtgaaattggagtaatttttttatgggggttttaaaatgtaagtgaatgtttttatttggggtgatttaaaagtttaagttgggaagtttaatgtgattaaaattaataggtgattgtttggggttgattgtgtgtgggtgtatatggtatttggtttgggtgttatttgtggtgttggattgttttattttgagtttgtaatttgggttttttagtgagttttttttttttttgaaagttaatggtttttatagtaattagatattttttttgtttgtttttttttttttttttttttatatataggagatgggatatttatttttgttgttattgataaggttggaggtggttgggtttttttttagtttttgtttgttttagtgtttgttttttttttgtttttttttggtttttttttgatgtagtggggaatgtgttttattaaaaaaaaaaaaaaaaaaaaaaaaaaaaagtaatttgtttggtaataattagtgtgtagtagtaggagttttagagttattggttatgtaaatagagggaggggagatggtgttttaaatttttttttatttttttaaagtgatattttttttttttttttttattattttttttgttttatttttgtttaaagaggttggttttggggtttgagttaattgtttgtatttttagtttatttgttttttttttttgttttgtagggaatttagtgtatggtttatttagtttgtgttttattttgttttgttggttttttgtgtttttgtttgggtttttttttttggtgagggaggtatttagttggttttggtgtgtttagagagtttgagttatgttatgtttgttgtatgtgttagtttggttagtatattagggtgttggtttttttttttttttttggagtgaaatatattaaagggtgtggtgggggtggggggtgatgggaggaaggaggtgaagaaatgttattagattgtattttttgtaaagatagttttgatttaagtatgtgttagagtatgtgttagggttgattgtgttggtggtgattttattgtagttggtttttagggagaaagtttggtgagtgaggtgtgaaattggaggggttggtgaggatgtgggtgaaggattgagtgtggaggttttatgtttttggggaaaggaaggggtggtggtgtttgtgtagggggagtgagggggagttggatttaattttttatttgtttttttttttttttgggttattttttagaaagttgtattggtgtggttatgtttagtgtagatattttgggtggtttgttagtagatgtaggggtgaggaagtgggttttttttgtgtggttgttggttgtgggggaattgttgggagttttgtttttggtttgtggtggttttagatgttgtattgtgttgttttatggtgtttgaagagtttttagaaatatgatggtttttgtttgaggattatattttatttttttagagaagtatttttttttttttttaatatttattttttttttttttttttttttttgtatatattttgtaggggggggtagaagggatgttgttttggtttttttaattggggtttttgaaatagttttgaagttattaggaatatagattttagggatatgatttttatttttgggtatgtgaggttgttattttttaaaattatttttttttttattttttatttaagggatttatttttaaattgtttgaggttattttatttttagataatttattttatatttttggattttaaatataagggtaggaggattaggatttgttttgaagaagttaaagttggagggttgtattttggtgtgttatatttatagaatgagtgaaattagagggtagaaataggagttggtagttttttgtgggttgttttgtttggggtttttggtatgtagggttggatggagggagaggggtggggggtggtgggggattgtgtttgaagttgggttgggttagttgttgttttttttaataatgagaggggaaaaggagggagggagggagagattgaaaggaggaggggaggattgggaggggaggaaaggggaggaggaattagagtggggagtgtggggagagggaggagagttaattgtttagttagtttgtgttattgttttagagtggagaagagtgagtaggggagagtgagattagttttaaggggaggattggtgtgagtgaggtagttttgaggttttgtttgtttattatttaatttttgttttttttttgttttattttttttttttgtttttattttttttttgaaaattttttatttagttaaaggaaggaggttaggggaatgtttttttttttttttttaaaaaataaaaatagaaaaatttttttttaggttggggaaagtaggagggagaggggttgttgggttggttatggagttgttgtgttatgaggtggatttggtttgtagggttgtgtgggattgtaatttgttttgagatgattgtgttttgtagaatttgtttattattgaggagtgttattttttgtagtgtttttattttaagtgtgtgtagaaggatatttaattttatatgtgtagaatggtggttatttggatgttggaggtaggttggggggtggtgtttgttaggagttaggatttttttggatgtttgggtttttggttggagttttaaatttgggagagggtaatttttgtgttggttttttggtttttgtgtgggagtttattgtgtgttttttggtgagatgtgtggttttatttttgtttttttttagataaattggggaggtagaggggggaggaaaatttgggagaagtgaggttgttttgggtgggggtaggggagtattttgtgtgtgtgtttttgtatgtggttgttttttttttttattttttttgtgatttgttttttgtgaagttgttgtggttgtttgtgttgtggttaggaagagagttggggtttgaaattgggattttgagtagaaaggtaattttttttaaaaggttagagtaaatttgttttggttttaggtttttgtttgtggttgtgattttgtgttggtattttattggggaggtggagggaggagggagaaggagagaaatggggaatttgggagttttggaagttttattgaagaaatgtgtgttttaggggaatttaaaagaattgttttttgttttttattttaagtttttgtttagtgagttgtgtgtttatgtatgtatagttttggatttgttgtggttttgttatgttgttttgtaaattttttttggaaaggttgggaaatgttgtttgtttatttttgtattttattattttggttattttatttttaattgtgtttttttttttattttttattttatgaagattatttatagtttggttttttagtttttttggtgtggagatttgggtggggtaggaagggggggagggggtgtgtgtaggggggatattgggttatttttgaaggagaggtgggagttttttgtgtttttttttagggttttttgtttttgtttttttttttgtttgttattgtgttttttagtttttgtttttgtgggttgtagttggatatttttgttgtggtgtttatttttttaagtttttttttgggatttaaagttttaggggttggaatatagatttttttggtatttgaaatttttgttttgggaagtttggtttttttttggggtttttatgttaaaagggtttttttaggatatttttttgatttttaattattttttgaaattatttttttttgttttgattttagttgttgaggttgtggtgtttttttttttttttttttttttttttttttttttatttttttttatttgtttttttaaaagtggtttttgggttgtagggatttttttagatattttttttaattgttgggaatgatagaggaggatttggggatttggatgagattaagaagtggatttttggagtttttagaatatttttattgattttttgaaaagatgatgaaatttaaaaaagagtgagtgagttagagtgtgtgaaggagtagttaaagggagtgttgtggagttgttgtggttgttgtgtatttttttgattttttgttttggagttgtagtttatttttttttataggatttttgggaatattaaagtattgatgggttattttgatttattttagtttttttatttttgttttttatttttattatgtattttggtttttttttttttttataaaaaaaaattaattttttttgttttgatagattatgtttttttatttttttttttttttgttgatgttatgttttttatttttgttttttaatttttttttatttttattataggtttgtgaggaatagaagtgtgaagaagaggttttttttttggttatgaattatttggattgttttttggttggggttttgattttgaagttttatttgtaatttttgggtgttgtttgtatgtttttggtttttaaatttaaagagattagtttgttgattgtggagaagttgtgtatttatattgataattttattaagttttaggagttgttggtaatgattggtttttttttttttttttttttgtgatttttgttttt

SEQ ID NO: 194 - DNA, 7572 bp, Artificial Sequence
  chemically treated genomic DNA (Homo sapiens)
gaaagtgggaattgtagaaaggaagggaggaaggggttggttattattagtagtttttgaggtttgatggagttgttggtgtaaatgtatagtttttttgtggttagtgggttggtttttttgagtttggaggttaggaatatgtagatagtatttaggagttgtagatgggattttggagttgggattttagttaagaaatggtttaggtaatttatggttagagggaagattttttttttgtatttttgttttttatagatttataatgggagtgggaaagggttggggggtgggggtggagagtatagtattagtaaaagagaaaaagaataaaaaagtgtaatttattgaaataaaaaaaattaatttttttttgtgggagggggaggggattagaatgtgtgataagaataaagaataaagatgaggaaattggagtgaattagaatagtttattagtgttttggtatttttagggattttataaaagggggtgaattatagttttaaaatggggagttggagaagtgtgtagtagttgtggtagttttgtgatgttttttttggttatttttttgtgtattttaatttatttatttttttttggattttgttatttttttaaaaaattaataaaaatattttggaggttttgggggtttattttttggttttatttggatttttagatttttttttattatttttgataattggaaaaaatgtttgggggggtttttgtggtttaggggttgtttttgggggggtgggtgaggagaggtggggaagagagggggagggaggagaggaggaagagtgttgtagttttggtagttggagttggagtagggggggatggttttaaaaaataattaaaaattgaggaaatattttagaaaagtttttttggtgtgaaaattttaaagaagagttaggttttttgaaatagaggttttgggtgttagaaaggtttgtattttgatttttggggttttggattttgggaggaaatttgaaggggtgagtgttgtggtgggagtgtttggttgtggtttataaggatagaaattagggaatgtggtgatgagtgaggggaaagatgggagtagagagttttggaaagaggtatggggggtttttattttttttttaggggtgatttggtattttttttatatatattttttttttttttttttattttatttaaatttttgtattgaggaagttggaaaattaaattgtaagtaatttttgtgaggtggggggtgggggagagggtatgattagaagtggggtggttgggataatggggtgtgagggtaagtgggtgatgttttttagtttttttaaagggagtttgtaaagtaatatggtgaaattatggtaggtttagagttgtgtatatgtgggtatatggtttgttgggtaaagatttggagtgaggggtaagaagtggtttttttgggtttttttgaaatatgtgtttttttaatgggatttttggggtttttgaattttttgttttttttttttttttttttttttttatttttttggtgaagtgttagtgtggagttgtgattataggtggggatttgaggttaagatgaatttgttttggttttttggggggggttgtttttttatttggggttttgattttaggttttgattttttttttggttgtagtgtaagtagttgtggtggttttgtaaaagataggttgtgaggggggtgggaagaagaggtagttatatgtaggaatatgtgtgtgggatgtttttttatttttgtttaggatagttttgttttttttagattttttttttttttttgtttttttagtttatttggagaggaatagaaataaagttatgtgttttgttagaaggtgtgtggtaaatttttgtataggagttgggaggttggtgtggggattgtttttttttaggtttagggttttggttggggatttgagtatttggaggggttttggtttttggtgagtgttattttttgatttatttttagtatttaggtggttattattttgtgtatgtagggttggatgtttttttgtatgtatttgaagtaggagtattgtggaaggtagtgttttttgatggtgagtaggttttgtaggatgtggttgttttggagtaggttgtggttttgtatggttttgtggattgggtttattttgtggtatagtagttttatggttagtttggtggttttttttttttttgttttttttggtttggaaaaaggtttttttgtttttgttttttggaaggggaggggagagtgtttttttgattttttttttttggttaaatagggggtttttgggggagaggtgagggtagagagagaaggtggagtagaagggaggtgaggattgggtggtgggtgagtagagttttggggttgttttatttgtattggttttttttttaaaattggttttgtttttttttgtttgtttttttttgttttgaagtggtgatgtaagttggttgggtagttagtttttttttttttttttgtgttttttgttttggttttttttttttttttttttttttttggttttttttttttttttttaatttttttttttttttttttttttttttttttgttattaaggagaatagtagttggtttgatttaattttaaatgtggttttttgttattttttatttttttttttttatttagttttgtatgttaggggttttggatagggtaatttataaaaaattattgatttttatttttgttttttaattttatttattttgtaggtgtagtatgttaaaatatgattttttaattttggtttttttaaaatggattttaatttttttgtttttgtatttaagatttaggaatgtagggtagattatttgaagatggggtgattttagataatttagaaataggttttttaagtgaaaaataagggagggggtgattttagaaaatagtaattttgtatatttagagataaaggttatgtttttgaagtttgtgtttttgataattttgaagttgttttgaaagttttgattaaagggattagaataatgttttttttgtttttttttgtagagtgtgtgtagaggaagaagagggagggagaggtgggtattaggaaggaaggggggtgtttttttggagggatagaatgtgatttttgagtagaaattattgtgtttttgggggttttttgggtgttgtggggtgatgtggtgtagtgtttagggttgttgtaggttgggggtagggtttttagtggtttttttgtggttagtggttatgtaggaaaaatttgtttttttgtttttgtatttgttgataagttgtttgaggtgtttgtgttgagtgtggttatattgatgtagttttttaggaaatggtttgggagggggagggggtgagtgagggattaggtttggtttttttttgttttttttgtgtaaatattattatttttttttttttttggaggtatgaggtttttatgtttggttttttgtttgtatttttgttgatttttttggttttgtgttttatttgttaggttttttttttgggagttgattgtggtgaagttgttgttagtatggttggttttgatatgtgttttaatgtatgtttgagttaaggttgtttttataggagatatgatttggtggtgtttttttatttttttttttttgttattttttatttttattgtgttttttggtgtattttattttaggaggaaggggagagattagtgttttgatgtgttggttaagttggtatgtgtagtgggtatggtgtggtttgagttttttgggtatattgaggttgattgagtgttttttttattgagagagggggtttgggtaggggtgtggagagttagtaaggtggggtggggtgtgggttgggtgagttgtatattaggttttttgtaaggtggaggaggggagtgaataaattagaggtgtaagtgattaatttaggttttggagttagtttttttaaatgagggtggggtggaaggggtggtgggggggaaaggaggggatattgttttaaaagggtgaggaagagtttggggtgttgttttttttttttttatttgtatagttaatagttttggggtttttgttattgtgtgttgattgttattgggtagattattttttttttttttttttttttttttttttagtaggatgtgttttttattatattaaaaggaagttaagggagggtggagggagagtgggtgttggggtgggtgaaagttggggagaggtttggttgtttttgattttattaatagtagtgggaatgagtattttattttttatatgtaaagaaaggggagggaaggggtgggtgaggaaaatgtttaattgttgtggaagttattagtttttaggaagaaaaaaagtttgttgaaaaatttaagttgtaaatttaaaatgaaatagtttagtgttgtggatgatatttgggttgaatattgtgtatatttgtatatagttggttttgaataattatttattggttttagttatgttgggttttttgatttaagtttttgagttattttggataaggatatttatttatattttaagatttttataagggaattattttaattttatttaagttatttttgagtggattaaagaaagttgtagtggggagaggtgagagaaggagggagggtgggaggtatttttaaagtataaatttaatttgataggtaagggatagaggttgttggggtttttagtttttggatattatttgatatagttttgtgagtaaggttttttttattttgattttgtatatttttttttttttggggaaaggtatttagagttttgggttttttgaagtgggggtagtgggggtgaggaagaagtgggtggttgttttggggtttagtttattttgaggagaatgtttgggtggtgagtttttatgttttgggagtgagttgagggtttttttgttttttttttttttttttttttttattttgttttgttttatagagaaattttagtggggaggggggtagtgaatgggaggggtagagagggttgtggttggatgttttttttttttggtgttttttgtatttatggagatttgtaagtttgggtgttttttgtgtggtaggtttgttttttgaagtttttttgtttatttttttttttgattattgattgtttttgagtgtgaagtttgttattgaatttaatttttggtggttttgtagatttttatatgtggggtggggtgtgagagggtgtggaggttggtaggaatgtttttaggaggtttggattggaaattgagtttttttttttggttgttattttagttatgtgttaaaattttaatgttttgttaaaatgtattttatttagtatgtgggaaaatgtatgttgttttttaggtaaaagtgtatatttttttttagtgtagattttggttttaagaaaaagtgtaagagtttgtgttttggttttgaagtttaaattgattattgtggtgtgggggtggggggtggtgggagggggtagattgttggtttttttttattttttttttattttttatggaaaaaaaaatatatatatatatattttatgtaggattggtgataaattttagtgaatgttagttttattggatttttattttttttttggttggttttttattttttatgttagtgttttggagttttggttggaaagtgtataaagtttggaggtggagggtgtagtagggtgttgggtgtttataggtatttttttgtaggagtttgtagtattaagtatatatatttttaagtttatttggaggatgttttttagttaggtgattttgtggttggtttaaggtttgggagtagtgtgagtttgagttttgttttttttgtgtaggggtgtttaggttaggtggggagtgggtagtgattgagtttaggtttagaaatgggagttattgttttttttttggtttttttaaagagtggagttgtgtttgtgtttttttgtggagggatggatggttaattaaaattgaaaatttgattggtaaaatgtgaggggatatataaatttgaggggatatataggaggtatattaagaggaaggagggagtgtaggtaaagtagaaaaatgtggataaggagaagaggaaaatgttgggaagtggagagtatgggggagtagggtgggtggggatgggtagtgtgattgtaggtgtttatttgtttttgggattttttggttgtagttgtgtttgttggggtgttgggttgttgtgttttggaggggggtagagtttgttaggtttgtgtatttgtattttttttggtgaattttggtttggatggggttggattattgaggtggtagatgtgataggtgtgagttaagaaggtgagtgtttgttgtttgttatttatttagtattttatttttttttttttggaaaaaaaaaaaattaaaagatttgaatttttttttttttttgtttgatttagtttaggatatgttttatgtggttgaaaatagttttggaaatatatttgttttataaaagtgaattttttaataagttttggggtggggggtgtttggtggttggtgttggggggttttgttttttgggaggagaaggaattggttgtttttgtttttttttttttttaggtgtttttgggagggggttgttgggtggtggaattgtgtttttgtttggggagttattatgtggtttttttgtggaattttgatgttatttatatgtgggggaaggggttgggagagtaagaggaagtggtgggggagggggttgtggttgggagagtgtggtggtggtgtggtgggtttggtatttttgtggtgggtgtagtgttgggtagggtttgggttttgggtagtgtggtagaggaggttgtgttgtggattttggagttagtgttgtgatttgtttttttttttgttttttgttttttgttattttttatttttaagtagtttattttttttattttgaaattggggttgttttttgttttggaaaaagtttatttttttaggttatggttttgttttgttgggtattgagattagattgaaattttgattattggttgtgatttttgttatttgattttttattttttttttatttgagagttgtgaatgttttttttggttttttggggagtgagttttgtattgatttttatatttggagttttttatgtgtgatatatttttttttgtttttttgttttatttattattttagtattagttgggttggttaatatgatggttattatatgtaagataatttgtgtatgtattgtgagtgatattggatgaattttgttgtatttggaataaatggatttagaaatatttttttaaaatagttttataaattgatgtgaaaatatgtagggtgattttttttttatttgttggatatttttgtggtatttgtgtttatgta

SEQ ID NO: 195 - DNA, 3491 bp, Artificial Sequence
  chemically treated genomic DNA (Homo sapiens)
gttggttttgaatttttgattttaggtgattttttttgttttgattttttaaagtgaagggattataaggtgtgaggtattgtgtttggttgtttttgaataattttgattaaaatttatatttgatatttattttaatatatattatagatttttattgataattttttttagtaagaaagataagttttatttaggtatttgtgaattggaggttaagtagttttagtatattttatatttttttaagattttttttttattttaaatgtttgtaaattttgtatttgataaagagtatatttttatttaatataaatatgtttttttttttagatttttttagtatttgagagatttgtatgtgtgtggttttttattttttttttttggttttttaagtttttagggtgttgttaggaggaggtttgtgattataaattttttttgaaaattttttaggaagttttttttttttttggagaattgaagtgttatttgattttaatttttttgtaaattttgttttttagagttgtttgttattttttgtttttgttgtagattttttatttatttggattggtttttgattgtaattatttggtgtgttgggtagtgtttttgtttttagtagtgtttgtattttttttatttgattttgggttgtggttgtggttagttagttagttgaaggttttatgttgttttttgttgttggttttatgttgttttttgttgtttgttgtttgttttttttttttttgtagttgttgagtgtatgtggtttgttttattttttggtgattagttagttttttttttttttttttttggtgttggtggaagagttttttttgattttgttttttaaattttttggagggattgtggtatttttttaggtaaggggatgttgtgagtgagtgtttggaggaggtgttattaattttgagtatttagtgaatgtggtatttttgaagttgttttaggttgggttttttttgggggtattagttggaagtagtttttgttagagttagtgttggtaaggaaggaggattgggtttttttttatttgttttttatattgttttttggtttttttgtttttagttgtgtttttttgtttgttagtaaaggtgtgtttgagtgtgtttattttgttaaaaagaaatttgtttttgttttgttttttttttttgtgatataatttttttaattgttaaattgaattggggtgtttggtgttatagggaaagtatggtttttttttttaattataagaaaaagtaaaattatttttttttagttgtgagagttttattgagaattgaaattatttgtatgattagaaagtgtttttttatttttttaatttttgatttttaggagtgtggggtttattaagttagaaattttagtttaaaggattttttttggagagttggattgtttttttttttttttttttttttttttttgtgtgtaaaatggttgtttggggtaagggttttttagatgtgtatattgtttggtataagagtagattttgaaaagatgaggtttatttaatatggatgggggagaattttgtttgtaggtagataggaaaatggggagggagttattggaaggatggattttatttttaaagttataatttttagattagaaaaagtgtttagtgttttagaagtagagttgtatagtgatttaaagattagttttaaatattgttttgttttttttatattttttatattttttttttttattgaaaatattttgtattttttgtaattataaagggggaagggaatatgagtgttttttgttttataggggttgttgtgagtttaaatgatgtattaatatatataagttttaagaatagtgttatatattttaagttaatatttgttagtttttgaattatttgttttgaggattggtttgtaattttgttttgaggtatagaaagaaaatgttttggagtaggatgtggtggtttatatttgtaattttagtattttgggaagttgaggtgggtagattatttgaggttaggagtttgaggttagtttggttaaaatggtgatattttgtttttattaaaaatataaaaattagttggttatggtggtgtatgtgtgtaattttagttatttaggaggttgaggtaggagaattgtttgaatttgggaggtagaggttgtagtaagttgagattgtgttattattttttagtttgggtgatagaatgagattttgatttaaaaaaaaaaaaaaaaatgttttggatagaattattattattatataaaaggaaagtttggatgtggtggtttatgtttataattttagtattttgggaggttgagataggtggattatttgaggttaggagtttgagataagtttgattaatatggtgaaattttgtttttattaaaaaatataaaattagtggggtttggtggtgtatgtttgtaattttagttatttggaggttgatgtaggagaattgtttgaatttaggagaaggtggaggttgtagtgagttgagattgtgttattgtattttagtttgggagataagagtgaaatttggttttaagaaaaaaagaaagaaagaaagaaagaaagattaagaagaatttattttttgaaaagattatgggtattttttattatttttatttataaagaaaagttaaatagtattaaagagtataataagtgtaaggaggtaaaagttttaattttttttgtgattattattttttaagtttattaaaaatatgtattatgttttaaaaaatggattgtttagattttgttgatgttttaagtatatgtttaatttgtttattggataatttagttttgtttaaaagttatattttaatttttggttgatttaaattttgtagatttagtatattttgtatttttagtgtttgtttgattttaaaatatgtagtttttaaaatgaagttaatgaaaataatttgggatgttaagtatgttattaaaatttataatgtattattgtattatttatattttttttggggtattttttaattagttgtgtagtaatgatagggaaaatttaaattattgataaataaaattattttagtttagtttaagatattttatgatggaggaggaagaaagtggttgttaggatgggagggagggaatatatttttattattaatataatggttttttttttttgtttgtttgttttgtgtgtttttttgagatggagttttgttttgttgtttaggttggagtgaaatggtattgtatgattttttttggtttattgtaatttttgttttttgggtttgagtaatttttttgttttagttttttgagtagttgggattataggtatatgttgttatatttagttaatttttgtattattagtagagatggggttttattatgttggttaggtttgttttgaattt

SEQ ID NO: 196 - DNA, 3491 bp, Artificial Sequence
  chemically treated genomic DNA (Homo sapiens)
gagtttgagataagtttagttaatatagtgaaattttgtttttattaataatataaaaattagttgggtatggtagtatgtgtttgtaattttagttatttgggaggttgaggtaggagaattgtttgaatttgggaggtggaggttgtagtgaattgagagagattgtgtggtgttattttattttagtttgggtaatagagtgaaattttattttaaaaaaatatataaaataaataaataaaaagaaagaattattgtattagtgatggaaatgtgtttttttttttttattttggtaattatttttttttttttttattataaaatattttaaattaaattaaaataattttatttattgatagtttgaattttttttattattgttatatagttaattgagaggtattttgaggaaaatataaatggtatagtaatgtattgtagattttaataatatatttgatattttaaattgtttttattggttttattttaaaaattatatgttttaaaattaagtagatattaaaagtataagatatattgggtttataaggtttaagttaattagggattgaaatataatttttaaatagagttggattatttagtaggtagattaagtatgtgtttaaggtattagtaaagtttgagtaatttattttttaaaatgtagtatatgtttttgataagtttaaaaagtagtagttataggaaaaattagaatttttatttttttgtgtttgttatattttttagtgttgtttaatttttttttgtaagtgagggtggtggagggtgtttataatttttttagggagtaagttttttttggttttttttttttttttttttttttttttttttgagattaagttttgtttttgttttttaggttggagtgtaatggtgtgattttggtttattgtaatttttgtttttttttgggtttaagtgatttttttatattagtttttgagtagttgggattataggtatgtgttattaagttttgttaattttgtattttttagtagagatagggttttgttatgttggttaggtttgttttgaatttttggttttaggtgatttgtttgttttggttttttagaatgttgggattatagatgtgagttattgtatttggattttttttttatgtaatagtgataattttatttaaagtatttttttttttttttttgagttggagttttattttgttatttaggttggagggtggtggtgtgattttggtttattgtaatttttgttttttgggtttaagtgatttttttgttttagttttttgagtagttggaattatatatgtgtgttattatggttagttaatttttgtatttttagtagagatggggtgttattattttggttaagttggttttgaatttttgattttaggtgatttgtttgttttggttttttaaagtgttgggattataggtgtgagttattgtgttttgttttaaagtattttttttttatgttttaaaataagattgtaagttagtttttaaagtggataatttaagagttaataggtattagtttaggatgtgtggtattgtttttaaggtttatatgtattaatatattatttaaatttataataatttttataaagtagggggtatttatatttttttttttttttataattatgaaaaatgtaaggtatttttagtaggaaagagaaatgtgagaagtgtgaaggagataggatagtatttgaagttggtttttggattattgtgtaattttgtttttagaatattgagtattttttttggtttaggaattatgattttgagaatggagtttgtttttttaatgattttttttttatttttttatttgtttataggtagaatttttttttgtttgtattaaataaattttatttttttagagtttgtttttatattaggtaatgtatatgtttgagaaatttttgttttagatagttgttttatatgtaggaggggaaggggaggggaaggagagagtagtttgattttttaaaaggaattttttgaattagggtttttgatttagtgaattttgtgtttttgaaaattaagggttgagggggtagggggatattttttagttgtataggtgattttgatttttggtggggtttttataattaggaaagaatagttttgtttttttttatgattaaaagaagaagttatattttttttatgatattaaatattttgatttaatttggtagttaggaaggttgtattgtggaggaaggaaatggggtgggggtggatttttttttaatagagtgaatgtatttaaatatgtttttgttggtaggtgggggagtgtggttgggagtagggaggttggagggtggtgtggggggtaggtggggaggagtttagttttttttttttgttaatgttggttttggtgagggttgtttttggttggtgtttttgggggagatttaatttggggtgattttaggggtgttatatttgttaagtgtttggagttaatagtattttttttgagtatttgtttatggtgtttttttgtttggaaagatattgtggtttttttagaggatttgagggatagggttggagggggtttttttgttagtattggaggaagaaagaggaggggttggttggttattagagggtggggtggattgtgtgtgtttggtggttgtggagagggggagagtaggtagtgggtggtggggagtagtatggagttggtggtggggagtagtatggagtttttggttgattggttggttatggttgtggtttggggttgggtagaggaggtgtgggtgttgttggaggtgggggtgttgtttaatgtattgaatagttatggttggaggttgatttaggtgggtagagggtttgtagtgggagtaggggatggtgggtgattttggaggatgaagtttgtaggggaattggaattaggtagtgttttgattttttggaaaaaggggaggttttttggggagtttttagaaggggtttgtaattatagatttttttttggtgatgttttgggggtttgggaagttaaggaagaggaatgaggagttatgtgtgtatagattttttgaatgttgagaagatttgaaggggggaatatatttgtattagatggaagtatgttttttattagatataaaatttatgaatgtttgggataaaaagggagttttaaagaaatgtaagatgtgttgggattatttagtttttaatttatagatatttggatggagtttattttttttattaggagggattattagtggaaatttgtggtgtatgttggaataaatattgaatataaattttgattgaaattatttagaagtggttgggtgtggtgttttatgttttgtaatttttttattttgggagattaaggtggggggaattatttgaggttgggagtttgagattagt

SEQ ID NO: 197 - DNA, 1145 bp, Artificial Sequence
  chemically treated genomic DNA (Homo sapiens)
gggtatggaggtattgtgttatttagggtaagattttgttttttttttagttttttttttaggatatttaatattttgtgaaatttagagattttgttttagttggatttagagaaatttagtgggaaaggagaggttaaaggttgaatttaatggtgtaaggttttatggtttggttattttttgttttgatgttgtggggttagtgggagaagaaagttagtgtgtttttgggtgtaggggttagtggggtttggaggtataggtattttgtgatattttaggttttttgatttatgtttttggtagttttgattatttatagttttagtagagtatggggtgggggtagaggggtttgtttgggagggttgttattttttaaaatttttgtgggttgtttagttatagttttttttgtttgggtgtgttttttgtttgttttttttttttgttttaggttattgtttttaattttgaataaaaattgtagttaatttttgaggtagttttattgtttagtggattttagtttttgttaggtttggtttgttatttttgttttgttttttgttggtttttgttttgtgtttagggattttttagttttttttgtttgtgttttttgtttgttttggatattatggataagttttggtggtatgtagtttggggattttgttttgtgttgttgagtttggtgtagattggtgagtgtttgttgtagtttgggtagtaagatgggtgtggggtgtttagtgtggatttggtggtagtttttttggttgagttggttttgggggattggagttaagtgagttgtttgtgaagtgtattgggttttggaaagtagggttgggatttgtgttaaattgttggagaatgtgtttgtggaagtattatttggttgaaagaaaaagagaaagagaagaaagtttgttgggtaggttgttggtgtgtagttttgggtgaggttgttagagttgtagtatatggtagaaagtaattgtttttttggatgtgtatagttgttgtttggattaataggtttttgtgtttaagggtttgttaagttttattgggttgtgtttaggtagggtagagttgggtggggtagagattggggttggaatagggtgagtggt

SEQ ID NO: 198 - DNA, 1145 bp, Artificial Sequence
  chemically treated genomic DNA (Homo sapiens)
gttatttgttttgttttagttttagtttttgttttgtttagttttgttttgtttagatatagtttggtggggtttggtgagtttttgggtataggagtttgttagtttagataatgattgtgtgtatttgggagaatggttattttttgttatgtgttgtagttttagtgattttgtttaaaattgtgtgttggtagtttgtttaataaattttttttttttttttttttttttttaattaaatggtgtttttatagatatattttttaatggtttagtgtaaattttagttttgttttttggagtttaatgtattttgtagatagtttatttgattttagttttttagggttgatttagttggaggggttgttgttgggtttgtgttgagtattttgtatttattttgttgtttaggttgtggtgggtatttattgatttgtgttaggtttagtggtatgaggtagagtttttaggttgtgtgttattaaaatttgtttatggtgtttggagtgaatggagggtgtgggtgaaaggagttggaggatttttgggtgtggggtaggggttggtggaggatgggatgaggatggtggattgaatttggtagaggttggggtttgttgggtaatgaggttgttttggaagttggttgtagtttttatttgaggttgaaaatagtgatttaagatggagggagggagtgagtgaaggatatatttaagtaaggggggttgtgattaagtagtttgtagaggttttaagaagtagtagtttttttgggtgggtttttttgtttttgttttgtgttttgttgaggttgtaaataattggggttgttagggatgtgggttggggaatttggagtgttgtggggtgtttgtgtttttgagttttattggtttttgtgtttagagatgtattggttttttttttttgttggttttgtggtgttaggatagaggatgattgaattgtaaaattttgtattattgggtttagtttttggtttttttttttttgttaaatttttttgaatttggttggagtaagatttttgggttttataggatgttggatattttgggagaggagttggagagagggtgaggttttgttttgggtggtgtagtgtttttgtgttt

SEQ ID NO: 199 - DNA, 2221 bp, Artificial Sequence
  chemically treated genomic DNA (Homo sapiens)
taatgatgatgtgtagtaggttttttagagttaagttggtgattaagatattgggattgttttgtatgtatttgtttttgtagataatttttagaagtgtggagtttttgatgatttttagtatgaatataaggtaggatataattgtgttgatgtatttgaaagtttttttgattttgatgggtttttggtatgggggaggggagatggtgtgtggtggagattttgttgttttgttttttttaggtatttttgtaggtgttaatgattgtgttagattggtgttggaatttttgggttataaggttttagtgggtggtgttattatttttgtggtttgtaaaagtggagtggttttgttaggtgggaagttttttttttttttttagatttgtgataggttgtaggtaagaattagtgtaattagggtgtgtttgtatagatttggaggtggttgtatgttgttatttgttttagaaggtgtttggtggttgttttgtagttttagagtttagagataagtagaggaaggaagataggatatttgggttagttgtttgagttaagttgttgtaaatgttaatattgtttgtagtttttttgttagtatttatgtttaaaagtaatttaagtttgtgtgttagtgggaaatttggtgtttatgatttgttagtgtgggttgaaatttttttttgatgtttttttagttgtttttttttttttgtgtggttaggaggggtaaataatatgtagtggggtggggtgttttggaaggggtgtgttagggagggaatgatgggggttttaggtaaagttttgaatttttttatgtaatgggaggaatatagatatgttttagttaagtgtgtgtgggaattgtggaattaaggtatttagaggttaagggtttgtgttaagttttgtattttgttttgtaggggaatttttatattttgtgattgaatttgaaagattttttttggtggatgaaagttgttattttttggttggttgagttatagtttttgtagtgtgtttaggagtgtgttggagatttggaaatttgtagagattttttaagttagtaggaatttggaaattgttgttttttttaaatggttttaaatatttgtgtttttttttttatttaatttaattttaatttgttttttttataggtttaatttttatttttttaaaattttaaattagtaagttaaattgaagttttagaataaggtttaattaatgattttaatttaatattaagtttgaatgtttattttttggatttgataaattagatgtagagtgatgaatggagattatttttttgggaggtggaatttagttgggttttagtttgttttgggagaggagtatgttttttttgagttgtaggtgggtttggttttgatgaaatgttgtgagaatgttagatagtgtagtttttattgtttgtttggggtttttgttgttattagataagtatttttatttatttatttttttttattaattattgttagattttttttgtgttttttgattttgttgtaatttttttttttgggtgatgtttggatagtattagtagtagttgtttgagggaggggggtagtttttgtttggggataggttttaaaaggttgtttatttgttagagttttatgttttttaaatgaatttaaattaagggtaagttattatgtattatgtgatatttggtagttttagattagaataaggttttgtattgaatgtgataattgaatttttaatgttaagtgttattttttttttaggtaaatgttttgttgttgtgatatttaaggttggtttgtgggtgttgttttttgttttgttttattttgttttgaagttttattttaagttaatattaattttaatatggaatagtttgattttttttttttaggtttttttattgttttgagagaggattataagtattttttattttttttagtatagttttttttttttttttttgttatagtattggtgttaggtaattttaggtatttttatattgtatttatgatagatttgatgtttattggagatatgaaaataattagaaagttgttatgtaaatttaatatgatatttatttattaggtagagtaatataataaggtttttttatttatttttgagttttatgtttattgtagagaggaaaataatagtgattggt

SEQ ID NO: 200 - DNA, 2221 bp, Artificial Sequence
  chemically treated genomic DNA (Homo sapiens)
attagttgttgttatttttttttttgtggtaaatatggagtttaagaatggatagaaagattttattgtattgttttatttggtaaataaatattatgttgaatttgtatggtagttttttgattatttttatgtttttgataagtattaagtttgttataggtatagtataaaaatgtttgagattgtttaatattgatattgtggtaggaagagaggagaagagttgtattggggaaaatgaggagtatttgtaatttttttttggggtagtgagagggtttgggaagaaaagattgagttgttttgtgttggggttaatgttggtttgaaatgaaattttagggtaaaatgaagtagagtaaagagtagtgtttataaattaattttaaatattatagtggtggaatatttatttgaaagaaaagtgatatttggtattaaaagtttaattattatgtttagtgtagagttttgttttagtttggagttgttgggtgttatatggtgtgtgataatttgtttttgatttgggtttatttgaagagtgtagaattttaataaataaatagttttttgggatttgtttttggatgaggattgttttttttttttgggtaattattattgatgttgtttaggtattgtttaaggggaaaggttgtagtggggttggaaggtgtgggaggagtttggtggtgattgatgggaagggatgaatgaataaaagtatttgtttgatggtagtagagattttgagtaaatggtggaggttatattgtttggtatttttgtagtgttttgttagagttggatttgtttgtagtttaagggaggtgtgttttttttttagagtaggttggaatttagttgggttttgttttttgggaaggtggtttttatttgttgttttgtatttggtttgttagatttgagaggtaaatatttgggtttggtgttgaattaaaattattgattgaattttattttggggttttggtttggtttattagtttgggattttaaaaaaataaaaattaagtttatagagagggtaaattaaaattaggttgggtaaaggaaggagtgtgagtgtttgaagttgtttggagggaatagtggtttttaagtttttgttgatttgagaagtttttgtgggtttttgaatttttggtgtatttttgggtgtgttgtgggagttgtagtttagttagttagggagtagtggtttttatttgttgggaggagttttttgagtttaattgtggggtatagaggtttttttgtggggtaaaatgtagagtttgatataagtttttggtttttaggtgttttaattttgtggtttttatgtatgtttaattaagatgtgtttgtattttttttgttatgtgaaagagtttggagttttgtttgggatttttattattttttttttggtatattttttttagaatgttttgttttattgtatattatttattttttttggttatgtgggggaagaaaaatagttgagagggtattaggaaggagttttgatttgtgttggtgagttatgagtgttaagttttttattggtgtgtaaatttgagttatttttgagtgtggatattggtgaagaggttgtgggtggtattagtgtttgtagtgatttggtttgggtagttgatttaagtgttttgtttttttttttttgtttgtttttaggttttgaaattgtggagtggttattggatgttttttggagtaggtagtagtatgtagttgtttttaagtttgtgtggatgtgttttggttgtgttggtttttgtttgtggtttgttgtggatttggggagaggagagaggttttttgtttgatagggttattttgtttttgtaaattgtagagataatgatgttatttattaagattttatggtttaagggttttaatgttagtttggtgtggttgttggtatttgtggaggtgtttaaaggagataggatggtaggatttttgttatgtattatttttttttttttgtgttaaggatttattgagattaaggagatttttaaatatattaatatggttgtgttttgttttgtgtttgtgttggggattattgggaattttatatttttgagaattatttataagaataagtgtatgtgaaatggttttaatattttgattgttagtttggttttgggagatttgttgtatattgttattg

SEQ ID NO: 201 - DNA, 2172 bp, Artificial Sequence
  chemically treated genomic DNA (Homo sapiens)
atatggtaggtgtttaataaatgttagtttttattggtattattattattattggtgttaatgtatttatttattgtagtgaggtagaatgtttttgtggttatgagtgtgattaggttgatttattattaagaggtggaggatagggaaggttgtatagtgttttattataaggaaaagaggattagtatgtttttttttgggaagggaaaaaaaaagagaaggaaattgaaagtatatggttgatttttttttaattataaagtattggatttatgggagggtatgtgggggattgtgtaagtatataggggtgtgggggaggaaggttaatgaatagatttattgtaaagggaggggtgatgaggtttattgtttgaggggaaggggagtagaaaattttatagatttttgtattatagtgagaggagagaaaagttattatatagattgatttaaagtagagagggaaaaggttatggattgagttattgaaaatagggagatgtaaagtattaaattaatttattattaaaaaggagagaattttaagtgttagagtgatagtttatgaaaaagaggagatagggtaatggattgatagttaaagggatgtgaatttaaatatgaagattgatttattataaaatggtggtggtggtggtggggggggggggtggttttgaaaaaagttatggattgatgtattgggggattggaggaggtaggaatataaatttaggtagatttattgttaaagagggatgtggaggagtgtggtgttatggattgatttgttatgatgtataggaagggtggaataaataaggttatggatgggttttttgaaagttgaggttaggagaaatttaaatatttagatatatttattattaagggggttgaatattgttataggttagttttttataagtgggggtgggtggggggtgggtgggggtaggggtagggggaaagtttatggatgagtttattttaagttggtgtggggaaaaatataagtatgtagattgatttattatataatgggagggggaggttaggttatggttagatttattataagggatgaagggtttgagtaatgttatatgtaggtttattagttgtggtggtggtggtggggagttgaatattagtaggttattggttaagttatattttttgtgtgggggtgggaaggatatgtggggttatggattgggttttttattttttaggtttagagtttatttgtgtgtagtgtggtggtggtgttggtaatgttggtagttttggggggtgggggttttatatgtggttttattgttttttaggtttgggttttgaggtggtggtggaggtggtggtggtggtggtggtggtagtatttagaagttgtttttgtgtttttttatagtttatgtgggtttgaggaggaggagtttaatgttttgttgtttgttgattggttaaagtgttattaattggttgtaaggttttgaggggttgggggatgggtttttttttatagagttgtgttgtgattggtgtaaggggaaatgatggaatgtttatggtttttggagttttgaggaggtgtgtttggtttttatggtgttttatgttgattggtttaaggattgatggattgtgagtaattgaaaaggtttggggtttgtgttgggggggtgggggtttgttttatattgattggtttatatgggattgatggaagatagtttttaaggatgggggtgggtggttttgtttttttttgattggtggatgagggatttttagatttttgttaaaatattaagggggtggtgttgtatgttatgttgtttagtggaagtagggtttgtatagaaatgggtgtagtagttggtgggagtgggttggattgggttttgtgtaggtgggtagggtagttttatggttagataagattatagagttgggtaaagatgaatttagaatatagtggaggtaggagggtaggatggttgttaggtatatgaaagagtattgagtggtagaaatgaaatgtttttagagggtagggttgaattgtggttagagttaaaaaggggaggaatttggttttgtattgattggtggtggttggatttaatttagaataggggtttgattagggagagtgggatt

SEQ ID NO: 202 - DNA, 2172 bp, Artificial Sequence
  chemically treated genomic DNA (Homo sapiens)
gattttgttttttttagttgggtttttattttaggttgagtttagttattgttaattaatgtagagttaggttttttttttttttaattttggttgtagtttaattttgttttttgaaagtattttgtttttgttatttaatgtttttttgtgtgtttgatagttattttgtttttttatttttgttgtgttttaaatttgtttttatttagttttatggttttgtttaattgtagagttgttttgtttgtttatgtggagtttagtttgatttatttttgttggttgttatgtttatttttatataagttttgtttttgttgagtagtatggtgtgtgatattgtttttttggtgttttggtaggggtttagaagttttttgtttgttaattagagaaaaatagggttatttatttttgtttttgggggttgttttttattaattttatgtaagttaattagtgtgaggtagatttttgtttttttgatataggttttgagtttttttagttgtttatagtttgttagtttttgagttaattggtgtggagtattgtgaaggttgaatgtgtttttttgggattttaggggttgtgagtgttttattatttttttttatgttaattatggtatagttttgtagggaagggtttgttttttaattttttgaggttttgtggttgattaatagtgttttggttaattagtgagtggtgggatattgggttttttttttttgggtttatgtgagttgtagggaaatgtaggggtggtttttaggtgttgttgttgttattgttattattatttttattgttgttttggaatttaggtttggggggtggtggggttgtgtatggagtttttgttttttggagttgttaatattgttaatgttattgttatgttatatataggtgagttttgggtttggagggtggagggtttagtttgtgattttatgtattttttttgtttttgtgtagaggatgtggtttggttggtggtttgttggtgtttgattttttgttgttattattatggttggtggatttgtgtgtggtattgtttaagttttttgttttttatagtggatttgattgtggtttaattttttttttttgttgtataatggattggtttgtgtgtttatgtttttttttatgttaatttagggtggatttgtttataggttttttttttatttttatttttatttgttttttatttatttttatttatagggagttagtttgtgatagtgtttagtttttttaatagtaggtgtatttgagtgtttggattttttttagttttaatttttaggagatttgtttgtggttttatttattttattttttttgtatattgtagtgaattaatttgtggtgttgtatttttttgtatttttttttaatagtgagtttatttgagtttgtatttttgttttttttagttttttaatgtattagtttatggttttttttaaaattattttttttttttattattattattattattttatagtggattagtttttatgtttggatttatgtttttttagttattagtttattgttttgtttttttttttttgtagattgttgttttagtgtttggggtttttttttttttaatagtgggttagtttagtgttttatatttttttatttttagtagtttagtttatagttttttttttttttgttttgaattagtttgtgtgatggtttttttttttttttattgtggtgtaggagtttgtaaggttttttgttttttttttttttagatgatgagttttattatttttttttttgtagtggatttgtttattggttttttttttttatatttttgtatgtttgtatagttttttgtatatttttttgtgagtttagtgttttgtaattgggggaagattggttgtgtatttttaatttttttttttttttttttttttttttagaagagaatgtgttgatttttttttttttgtgatggagtattgtatggttttttttgttttttattttttaatagtgggttagtttggttatatttgtaattataaagatgttttgttttattataataagtgaatatattagtgttagtgatgatagtaatgttaataggagttagtgtttattgagtatttgttgtat

SEQ ID NO: 203 - DNA, 3289 bp, Artificial Sequence
  chemically treated genomic DNA (Homo sapiens)
tttgtgtttatgtattatgtgtgtttttttgtttttttttttttttatgagtgagaaaaaaaagtgtttaaatttttattaatataaattaatgatatataatgatgaaattttgtttttatttttgtttgtgatagggaatgtaaaaatagtaagtggtttagttttatgaatttttgttttttgttttttttgtttttgttgggttggatttttaagaatggaggttagtgtatagttttgtgtgggttgtttagtttttggatttggtggatgatgttaggtgatgggagtggttgtggttgggttggggaggttgtggtttaggggagttgggagggagggtggttttgttaggttgatggtgtgtttggttgtgtggtgttgtttggagatggttttggtggtgttgtgttgttgtaaatagttgtttttttgttattatttatagtaggattttttggtttttgggtgtggtggttggaggtaggtttgtggtttggttttttgtgtgttttgaattatttgtttgttggttttattttgttttgtttttttttaggtgtttattgtgggttttgatttttgggtttgaagagtggagaagggaagattggggttgtgtggggatatgtgtttttgtgttttggaggtggttagtgtgttggggttgagttttggtagtgtgattttggttgttttatgtagtagggtaggagattggggggtgtggtatattttggagtattttgtttttttaaagttttgtgttttaggatgtggagttgtttttggggttttagtagttgaggtattttgtttaggtgtagttggatattgtttttttagtttttgttttttattttttaagtttgtgttggaaaattatttgttgtgggtttttgtaagtatagttttttggtgggattgaattagtttttagtgtagatttgagttttttgtaggaagtatattttgttttgttattttgaattgattattttgtttatataattatattttgtattttttatttttggggtttagtttagaattgggtagatattttttttaaatgtttttgtatgtaggttttgtatagtgtttatttgttggtgttttagggatttgatagtttttttaatatttttatatatggttgagaaaaataaataaataaatgtgttgttttttttaaaaaaataaataaataaagtatttagtattgtaaagtaggttattgtatttttttattttggattttttattttttgtttttaaatgtaggaatagtgttagtattgtttgagtttgagggttggaggttaggggatgaaggtttgtttttatgttttgtattgaattagggttagaattggggatgggggtaggggtgtatttttttgggagttgaggtttaagtttttggggttttgtatttgatgttgttttttttatttttgagttttagaattgtttttagtttttgtataagggtaaaaaggtgttttttgttttattttttttgattttgggaataagggtttgtattgaattaggtgtgaatgtttttttttattttgtgttgtttttgtttttttttttttagttgtggtttttgtttttttttgtattgtatttttggtgttggttgtagtttgtgagtagtttttgttaatttttttttttttatataggatgtttatattaggatatttgtgttagtaggtttttatggtttttttttgtagttttggggggagttatttttgaaattttttattttggggggtttatgagatttttgagataggaattgtgaaatgtttatgagattaggatatgtgttaaggtgggggtagggagttgtgagtgttggggatgtagttgggtggttgtagaagtgtttaggtttgtgtgttatttttttggtgttattgtggttgagtttgtgatgtttatatttatttataaaatgtttgttataaaagtagtggttgtggtgttttgtattttaattgtatttgtagtgagtatttgagaagttaagattgagttggtggttgtggtgtagtgaatgagtagtgattgtgtttttatttagttttgttttatagtgtttatttgtttttgttttttggttttttgtttggttttgtttaattgttatgatgatgtttttgggttttaatgtagattatgaggtgttatttttttgttgtagtagtgtgtttttggttggggatagttttttttattattatttatttgtagattttttttttagtatgggtttgtttgttaatgtgtaggtaaggttggttttttgttgttgtggggttgggggtttggggttgtggaggaggagatattgggtgggatgttttagtagatgagtagggggtttttttgtgtttggagggaggttgttgtggttggagtggtgttggtttgggggtttgggatttgttttgagtgtatgtatgtttgttatagtaagaattggttttttttttgggaggtaggtttgttttgagtaatttttggtttgtattttaggatggatttttgatattagttggagtagatgtgttttaagtataaatttgttaattagagtttggtttttttggggaggtggtagaaagtggtaatttttttttttttggtagtttggagtatggaggagggatgagggaggagggtgtagtgggtgggtgtgtaaggtagttttattgataaaaagtgagtttattttggagattttggagtggtgtttgtgttagtgtagatgttagggatatttataataaatttttttttaagtaagtgatgttgaagggataatgggaatgtagtggtaggatggaagagataggtattgtgttgtggaatgtttgggaggaaaagggggagattttttatttaggatgagggatatttaagatgaaatgtttgtggtaggattgtttttttttattgttgtatgtggtattgggaatttgttttatttgtgtttggaatttgtttgtttatgttggttttttttttttgttttgttttaggatttttgtatggatttggttgtttttagtgttaattttatttttatggttattgttattttgattagtttggatttgtagtggttggtgtagtttgtttttgttttttttgtggttttattgtagattagagttttttatttttttggagtttttgttttttttgttggggtttattttagggttggtgttgtgaagattatgataggaggttgagtgtagag

SEQ ID NO: 204 - DNA, 3289 bp, Artificial Sequence
  chemically treated genomic DNA (Homo sapiens)
ttttgtgtttggttttttgttatggtttttataatgttagttttggagtaagttttagtggagggggtggggattttgaaagggtgaggggttttggtttgtgatggggttatggaggagatgagggtgggttgtattagttattgtaggtttggattggttgagatggtagtgattgtgggaatgaagttggtattggagatggttaggtttgtgtagaagttttagaataaaatagaaggggaaagttgatgtgagtgagtaggttttggatataggtggggtgagtttttagtgttgtatgtagtagtgaagagaaatgattttgttatggatattttattttaaatgttttttattttggatgaaaggttttttttttttttttttaggtattttgtagtgtagtgtttgttttttttattttgttgttgtgtttttgttatttttttagtattatttgtttgaaagggggtttgttataaatatttttgatgtttgtgttgatgtaggtgttgttttggagtttttagaatgaatttgttttttattaatgaaattgttttatatatttgtttgttgtattttttttttttattttttttttgtgttttaggttgttgggggaggggggattgttgttttttgttatttttttggagaagttaggttttagttagtgagtttgtgtttgggatatgtttgttttagttaatgttagagatttgttttggagtgtagattagaggttgtttagaatgaatttgttttttgaagggggaattaatttttattatggtaagtgtgtgtgtgtttagagtaagttttgagtttttgagttggtattgttttggttatggtagtttttttttaggtataagggagttttttatttatttattggagtgttttgtttggtgtttttttttttgtgattttaagtttttggttttgtggtgatgggaagttagttttatttgtgtgttgataggtgagtttatgttggagaaggagtttgtgggtgagtggtagtaagagaggttatttttggttggggatgtgttgttgtagtgggaggatgatgttttgtagtttgtgttgaagtttgagaatattattgtggtggttaggtaaagttgggtgaggggttgaggggtggagataggtgggtgttgtggagtagagttgggtaggagtatggttattgtttgtttgttgtgttgtggttgttggtttagttttggttttttagatgtttgttgtagatgtggttggagtatgaggtgttgtagttattgtttttataataagtgttttatgaatgagtgtaaatgttatgggtttaattatggtggtgttagaggggtggtgtgtgggtttgggtgtttttgtggttgtttggttgtgtttttagtgtttgtagttttttgtttttgttttggtgtgtgttttaattttgtgagtattttgtagtttttgttttagaggttttgtgggttttttaagatgaggggttttggggatggttttttttagggttatagggaaaggttgtggaaatttgttgatgtagatgttttaatatggatattttgtgtaaggggggagggattgatgggaattgtttgtgggttgtagttaatattgagggtgtagtgtggggggaggtgggggttgtggttgggggaggggaggtgggaatggtgtagaatgagagagaatatttgtatttggtttaatgtggatttttgtttttgaggttgggggggatggggtagagagtgtttttttatttttgtatggaaattgaagatagttttgaggtttagagataggagaaatggtattgagtataggattttgaggatttaagttttggtttttgaaggaatgtgtttttatttttatttttaattttagttttaatttagtgtaaagtgtggaagtagatttttattttttaatttttagtttttgggtttgagtaatattagtattgtttttgtgtttggaagtagaaagtggaggatttaaaataagagaatatgataatttattttatgatattgggtattttatttatttatttttttaaagaagatagtgtatttatttatttattttttttggttatgtgtgggaatattaaggaaattgttaaatttttgagatattagtagataaatattgtgtaaaatttatgtgtgaagatatttgaagggggtgtttgtttggttttgagttgggttttaggggtagggagtgtgaggtgtggttatgtgggtagggtggttagtttgggatgataaggtggggtgtgttttttgtggggaatttaaatttgtgttgagggttggtttggttttgttaggaagttgtgtttatgggagtttgtagtgggtgattttttagtgtggatttggagggtggaggatgggggttggaaggatagtgtttagttgtgtttgggtggaatattttgattgttgggattttaggagtggttttatgttttggaatatggggttttggggaggtaaggtgttttagagtgtgttatgttttttaattttttgttttgttgtgtaggatagttggggttatgttgttggggtttagttttagtgtgttggttatttttagggtgtgaagatgtatgtttttgtatagttttggtttttttttttttattttttgggtttgggggttggggtttgtggtgggtatttggagaggggtgaggtaggatgaggttggtgggtggatagtttggggtgtgtggggagttggattgtagatttgtttttagttgttgtgtttgggagttaggagattttgttatagatagtaatagggaagtggttgtttatagtaatatagtgttgttagggttgtttttaggtaatgttgtgtggttgggtgtgttgttggtttggtgaggttatttttttttttagtttttttgggttgtggtttttttggtttggttgtggttgtttttgttgtttgatattatttgttgggtttgggggttgagtggtttgtgtgaggttgtgtgttaatttttatttttagagatttaatttggtaggagtggggagggtaggaggtggggatttgtggaattgggttatttgttatttttgtattttttgttataggtagaggtgaaaatagaattttattattgtatgttattggtttatgttggtgggaatttaggtgttttttttttttatttataaaaagggagggaaatggaaaaatatatataatatgtaaatataga

SEQ ID NO: 205 - DNA, 3812 bp, Artificial Sequence
  chemically treated genomic DNA (Homo sapiens)
agtgagattgtatggttttatttataagtgggagttgaataatgagaatatatggttatatggtggtgattaatatatattggtgtttgttgagtggggtgttggggagggagagtattaggaagaatagttaagggatattgggtttaatatttgggtgatgggatgatttgtatagtaaattattatggtgtatatatttatgtaataaatttgtatattttttatatgtattttagaattttaaataaaagttggatggttaggtgtggtggtttatgtttgtaattttagtattttgggaagttgaggtgtgtagattatttaaggttaggagtttgagattagtttggttaatatggtgaaattttgtttttattaaaaatataaaaattagttagatgtggtatgtatttataattttatttatttgggaggttgaagtagaattgtttgaatttgagaggtggaggttgtagtgagttgttgagattgtgttattgtattttagtttgggttatagtgtgagattatgttataaaataaaataaaataatataaaataaaataaaataaaataaaataaaataaaataaaataaaataaaataaaataaaaaaataaaataaaataaaataaaataaagtaatttttttttttttaagtggtttttattttttttttttgttttgtgaagtgggtgtgtaagttttgggattgtagtggttttagggaatttttttttgtgatgttttggtgtgttagtttgttgtgtatattttgttgtggttttttttttgttgtttgtttattttttaggttttgttggggatttgggaaagagggaaaggtttttttggttagttgtgtggtgattttggggattttagggtgtttttttgtggttgatgtttggggtgtagtggttgttggggttggggttggtgggagtttgtgggattttttagaagagtggttggtgttgtgatttagtattggggtggagtggggtgggattatttttataaggtttggaggttgtgaggtttttgttggagttttgttgttgtagtttttgttattagtgagtatgtgtggtttgtgtttttggggatggggtttagagtttttagtatggggttaatttgtagtattaggtttgggtttttggtagggttttttgtttattttgagatttgggatgggggtttaggggatttaggatgtttttagtgttgttagtggtttttagggggtttggagtgttttggggagggatgggattttgggggtggggagggggggtagattgtgtttattgtgttttggtatttttttttgggttttagtaaatttttttttgtttgttgtagtgttgttttatattgtggtttattttttagtttgaggtaggagtatgtgtttggtagggaagggaggtaggggttggggttgtagtttatagttttttgtttatttggagagatttgaatttttttatttttttgttgtgtggtttttattttgggttttttttttgttttttgttttttttgttatgtttgttttttgttttagtgttgtgtgaaatttttggaggaatttgtttttttgttttttttttgtatttttgatttttttttgggttgttgtgaggtggagttggtttggtttttatattttgtatttttttttttttgtaggttgttgtgtggttttgtgtatgttgttggtagattagggttagagttggaaggaggaggtggtgattgtggagatgtggtaggagggtttatttaaagttttttgtgtaagtgattatgtttgggtaaggggagggggtgttgggttttagggggttgtgattaggattgggggatgtttaagtttagtgtttttttttgagttatgttttttttaatagttatatgggtagttttttaagttttaggatggagattttattttgtattagtttaatattattttgtgttatttgggttgtatttttggtgagttttgaatttttaagtttagggtaggtatgggtaagtttttgtttttggagtttttttgtttaaattagttgttttgtagttttttggagtggaggaaattgagatttattgaggttatgtagtttgtttaaggttaagtttgggtgtttgtaatttttgttttgtgttaggttgttttttaggtgttaggtgagttttgagtatttgttgtgtggtagttttttatttttttatgtatattttttttttttttttttaggttggggtttatagatagttttttggttggtttatttttagtgattgtgtgttgattaggtgtttagttatgtggtttgtttttttttatttaattttagggttttatgggaaggattagtaggaggtagttttggtggatatggtgaatgatggtgtggaggatttttgttgtaaatatattttttttatttatattaattatgtgagtatttgtattagggttgggtattgggggttgaataaagaaaggggttttttgtgtttttattttttttattttttaggtggtttgggttgatttttttttgggttagggtgtaggggttgggttagttttgggttaggggtttaggggtttgggataagatataatttgtatttttattgtttgggatattaattagttaagtaatgggttatgggggtgagtgtaaggatagagatttttagtaattggtggtttttgattttttggggtggtgagggttttttggagtagttagaggtggaggaggatttgttgttagtttttggatggaggtgttggtatttttagttgaggaaaatatgtagatatagagtatatttggggatttgggattagtttagtagaggtagtgtgtgtgtgtgtgtgtgtgtatgtgtgtgtgtgtgtgtgtgtatgtttgtatttgtgttgggtgggtaaggagatagagatgggtgggtagtaggtttaggttttgaaggttttgaatttattggtttggagttttttaagggtaatgggggttattgagaagtttgaatagggttgtgtttgaatgtgaggtttagaaggattttttagagaagttagttttaaagtttttgtaattatttggtgagagaatttagtaaggatggataggtagaatggaatagagatgagttggtagttgaagtggataggatttggtattagtttggttgtggggagtaagtagaggagaatttgggattttggtgtttggtttggggtagatgggggtgttttaggggttgggagggatgagagtaggatgatatatggtggtgtttggtaggaggtgggtaaggatgattatgtgaaggtattgtttgggtaattgaagttttttgagattttgttgttttagaattagggaggtaagatttttattgtgggagattaggtgagtatttggttttatgttgttttttttttgttattttttgtttttagatggatataggtgtgagttatttgtttagtaaagtagagtagatttaggggatgggtttaggttttttgtttttaatttttttagtttgtttttgttggttgagtttttggtttttttgttttgtagattttttttgttgattataatttgttggatttgttgttgatttatgaggttttagtttttggttgtttggatgtgttttttttgtttttagtatatgtggggtgttttagtgtttggtttaagtttaaggtttttttggttttttttgagtatgtgaatttttttattaatggtaatgggaaat

SEQ ID NO: 206 - DNA, 3812 bp, Artificial Sequence
  chemically treated genomic DNA (Homo sapiens)
gttttttgttgttattgatggggaggtttatgtatttaggggaggttaggaaggttttgagtttgggttgggtattgaggtgttttatatatgttgagagtagggggaatgtatttaggtagttaggggttaggattttatggattagtagtaagtttagtaggttgtagttagtgaaggagatttgtagggtaggggggttagggatttagttagtgggagtaggttggaggaattgggggtagagggtttaagtttattttttaggtttgttttgttttgttaaataaatggtttatatttgtgtttatttggaagtagagggtggtgaggaaggaatagtatggggttagatgtttatttggttttttataatgaaggttttgtttttttggttttgggatagtagggttttaaaaggttttagttgtttgggtagtgtttttatatagttatttttgtttgttttttgttagatattattatgtattattttatttttattttttttagtttttgagatatttttgtttgttttaggttagatattagagttttagatttttttttgtttgttttttataattaggttagtattaaattttgtttattttagttgttaatttatttttattttattttgtttgtttatttttgttgggtttttttattagatgattgtaaaagttttagagttggtttttttggaggatttttttagattttatatttagatatagttttgtttagattttttaatggtttttattgtttttaggagattttaaattagtgggtttaaggtttttgggatttgggtttattgtttgtttatttttatttttttatttatttgatataaatgtaagtgtatatatatatatgtatatatatgtatatgtatgtgtatatatgttgtttttgttgaattggttttaggtttttaaatgtgttttgtgtttgtatattttttttagttaaaagtgttagtatttttatttagaaattggtgataaatttttttttatttttggttattttaggaagtttttgttattttaggagattagaaattattagttgttggaggtttttgtttttgtatttgtttttatgatttgttatttggttggttgatgttttaggtaataagggtgtaggttgtgttttgttttaggtttttgggtttttggtttagagttgatttagtttttgtattttgatttaagaaggggttagtttaagttatttgaggggtaaggggggtgagggtataagaagtttttttttttgtttagtttttagtgtttaattttggtgtagatgtttatatagttggtgtagatgagggagatgtatttgtagtggaggttttttatgttgttatttattatgtttattagggttgttttttgttggttttttttatagagttttggggttgggtggaggggagtaggttgtgtgattgggtgtttgattaatatatagttattggggatgggttaattagggggttgtttgtgagttttagtttgggaggaggggaagaggatgtgtgtggaaggatgagagattgttatatagtaggtgtttagagtttatttgatatttgggaggtagtttggtatagggtaaggattgtaggtatttaggtttgattttgggtaaattatgtaattttagtgggttttagttttttttattttagagggttgtggggtagttgatttaaataaaagggttttgggggtagaggtttgtttatgtttgttttggatttggaggtttaagatttattaagggtgtggtttaggtgatgtaggatggtattggattggtatagggtgaggtttttgttttggaatttggggagttgtttgtatagttgttgggggaggtatggtttagggaggggtattgagtttgggtgttttttgattttagttatagttttttaaggtttagtattttttttttttgtttgggtatggttatttatgtaggaggttttgagtgagtttttttgttatgtttttatggttattattttttttttttagttttggttttgatttgttagtagtatgtgtagggttgtgtagtggtttgtggggagggagaagtatgagatgtggggattgggttgattttgttttgtagtaatttggggaggggttaggagtgtagggagggaatagggaaataggtttttttgaagattttatataatattggggtggggagtaggtatggtgggagaggtggggaataggaaggaggtttggggtaaaagttatatgatggagggataagggggtttggatttttttgggtgggtgaggggttgtgggttgtagttttagtttttgttttttttttttgttagatatatgtttttattttgaattgggaaatagattatggtgtagggtggtattgtagtgaataaagaaaagtttgttggagtttgggggaggatgttaaggtgtggtgagtgtagtttgttttttttttttgtttttggggttttatttttttttgaggtgttttgggttttttgaaagttgttaatggtattggggatgttttgggttttttaggtttttgttttgggttttgaggtgggtgaggagttttgttgggagtttgggtttgatgttgtgggttggttttatgttgggagttttgagttttatttttggggatgtgggttgtgtgtatttattggtggtgaagattgtggtggtgaaattttagtgaaggttttgtggtttttgagttttataagggtggttttgttttgttttgttttagtgttgagttatggtgttggttgtttttttggagggttttgtggatttttgttggttttagttttggtggttgttgtattttgggtgttggttgtagaggggtgttttggagtttttggagttgttgtgtagttggttggggaagttttttttttttttttaggtttttagtggggtttagggagtaaatagatagtaggaagaggattgtagtgaagtgtgtgtagtgaattggtgtgttgggatattgtggggggaaattttttaagattgttgtgattttggagtttgtatatttgttttatagggtaggggagaggggtggaggttgtttagaggaaaggaaattgttttattttattttattttattttatttttttattttattttattttattttattttattttattttattttattttattttattttgtgttattttattttattttatgatgtagttttatgttgtggtttaggttggagtgtagtggtgtgattttggtggtttattgtaatttttgttttttgggtttaagtaattttgttttagttttttgagtaggtggaattataggtgtgtgttatatttggttgatttttgtatttttagtagagatggggttttattatgttggttgggttggttttgaatttttgattttaggtgatttgtatgttttggttttttaaagtgttgggattataggtgtgagttattatgtttggttgtttaatttttatttgaagttttggggtatatgtagaggatgtgtaggtttgttatataggtgtgtgtgttatgatggtttgttgtatagattattttattatttaggtattaagtttagtattttttagttattttttttggtattttttttttttagtattttgtttaataggtattagtgtgtgttgattgttgttatgtgattatgtgtttttattgtttagtttttatttataagtgagattatgtggttttgtt

SEQ ID NO: 207 - DNA, 1267 bp, Artificial Sequence
  chemically treated genomic DNA (Homo sapiens)
atgaattttgaaagttggattgtagagtaaatgagtgtagttaatttagttaggggtttgtaagagggagaaagagaaaaagattgtggaatggaaagttttttaatttaagttttttttaaggggtagttattttttgttttatagtttagggtttgtatgtgttttttttggagtggaaaaatatataagttataaggaatttaatagatagaaaggtgtatagaggaatttaaagtgtgggttggggggtgaggtggtgggtgggaggtgagtgggtgtaggtggaatattgttttttaagttaagttgttgtaaataaaaaggtgtaaagggagagaagttggtgtttaatgtgagttaggagtagtgttttggttttttttttgtttattttaaaagtattttttgtattgtttttaaggtgagaaataggaaagaaaatgttggtttgtgtgtttgttgtttgtttttttggttgtttgtttttgtagggttgttgggagtttttaagttttgtgagaattttgggagttggtgatgttagattagttgggttatttgaaggttagtagtttgggtagggtttattgaaagtttatttgtatatattaggtaatttaattttttattttgtgtgatagaagtagtaggaagtgagttgtttagaggtaggagggtttattttttgttaaaggggggattagaatttttttatgtgagttgtttgaggattgggatgttgagaatgtgagtgatttgagtagggtttgtttgggtattgttggggtaggatttggaatgtatttggaaggttttttgtaagtatttatttggaaggagaatttgggatttttttgggaattttttgttttggttggattggttgagtaagtttggaaaatggtaaatgattatttggattaattataggtttttagttggtttgtttgttataatttatgatttggggttgggaaaaagattaatagtttatgtgttaaaaaaggggtagagtttgatggagttgggtggatttttttatgttatttgtttttatatttagaggataagtatttttgtagatatttagtgtaagggagattatgtttgattgtatggatgttttgttagtgagttttgggtaaattttggatttttatattgtgagtttgtttttttgtatgttttaggagaaagtttttaaagtatgttttagtggattgatttaaattgaatggtagtattggtatattgtttaatgtag

SEQ ID NO: 208 - DNA, 1267 bp, Artificial Sequence
  chemically treated genomic DNA (Homo sapiens)
ttatattgagtagtgtgttgatgttgttatttggtttgggttaatttattgaagtatgttttgagagtttttttttggagtatgtaggaagatggatttgtagtgtagaaatttaggatttgtttaggatttattgatagaatatttatatagttaaatatgattttttttgtattgaatgtttgtaaaagtgtttattttttaggtgtggaggtaaatggtatagaaaagtttatttaattttattaaattttgttttttttttggtatgtaggttgttggttttttttttagttttgaattatgaattatgatagataagttagttaaaagtttgtaattgatttaaatgattatttattattttttaggtttgtttggttaatttagttggggtggggggtttttagaaagattttaagttttttttttaagtaaatgtttgtaaaaagttttttgaatgtgttttggattttattttgatggtgtttagataaattttgtttggattgtttgtgtttttggtattttagtttttaaatagtttgtatgggggaattttggttttttttttggtaaagaatagatttttttgtttttgaatagtttattttttattatttttgttatatagaatgaaagattgaattgtttaatatatgtgagtgaatttttggtgaattttatttgggttgttaatttttaaatgatttaattagtttgatattattaatttttaggatttttatagagtttaaaaatttttagtagttttgtaaaagtagatagttagagaggtaggtagtgagtgtataagttggtgtttttttttttattttttattttaaaaataatataagaagtgtttttaaaatgagtaggggaggagttgggatgttgtttttggtttatgttgagtattaatttttttttttttatgtttttttatttgtggtggtttagtttggaaaatggtgttttgtttgtgtttgtttgttttttgtttattgttttgttttttagtttatattttaaatttttttgtgtgtttttttgtttgttaaattttttataatttatgtatttttttattttagaaaaagtatatgtaagttttaaattgtagaatagagaatggttattttttgggaaaggtttgggttgggaaattttttattttatagttttttttttttttttttttttgtaagtttttggttgaattgattgtatttgtttgttttgtaatttagtttttgagatttat

SEQ ID NO: 209 - DNA, 1266 bp, Artificial Sequence
  chemically treated genomic DNA (Homo sapiens)
agttatgtagtttttttatttggagagaagttggagtattgggatagatttaggaggttagagtggaaattttgtttgggtgtgtggaattggagtttttggtgtgtggtgttaggtatttatttgtatggttgagtgttaggattgtgtatagtagtagggtgtgggtgagtattgtagtggtgggtagggtgtggtgtgggggtaggttttgttgtttgagggtgtttggttgtggagttgaaggaggtgttgttgaggagtttttggatgtgtttttgatgtttattgtaagttgtatgataattggttgttaattgagagaatttttttttttataagattgaaaattaagtttatgtgatgaaatgattgtttttttttgtttttttgtattttttataaattttttttttttttttttttaaaaaaattgtgtaagtttggtgggggtagggttttttatttatggaaatgagaaaattggaaatttaggaagttgttttaatttgggagtagagggggtagtttttatttttttgtttgattttttttttttttttttgagttttattgttttaggtgtataggtttttgttagatgtttttttttttttgtagtttttgtttgagtgtttttgagagttagttttggattgattgttttggatgggatattgggggagggtagaaggatatttggttttttttttaggaatttgagtggttttgaggtttgggggtgtagggaatttttttttttgttgttgttgttgtgtttggtttgtatgtttttagagggttgaggaagttatgttgggatagattggggtgagtaaggttaagaaaggttgatatgttttatgttttagtgatgatgtttaataggttgtatatttgttttatatgtagtatatatatatatagttttttaaaaaatttttattttgtggaatgaaatagttatttttagtgtatatagttgtaatttatttttgtagttaagttgtttttaatagaagaaatattgttttttgtatttttattttttttttgttttttggaaagagaggtgggaaaggtaaattttttttataatattggttttaagtagttattttgtaaatagttaatgtgagttttatgggttattaatataaagttttttgttttttgatggataaaggaagtggtgatggttagaatttgtagggatgttaaatgtttaaaatgtatgttttaaggtatttttttttttgatgtgtg

SEQ ID NO: 210 - DNA, 1266 bp, Artificial Sequence
  chemically treated genomic DNA (Homo sapiens)
tatgtattagggagagaaatgttttaaggtatatgttttggatatttagtgtttttgtaaattttggttattgttgttttttttgtttattagaaggtaggaaattttatattggtgatttgtggagtttatattaattatttatagggtaattgtttaggattagtattatgaggagaatttattttttttgtttttttttttaagaaataaggagggggtgaaggtatggagaatagtattttttttgttgaaagtaatttagttataaagataaattatagttatgtatattgaaggtagttattttattttataaaataagagttttttaaaaagttatgtatgtatgtgttgtatatagagtagatatatagtttattaagtgttgttattaaaatataaaatatgttagttttttttaattttatttgttttagtttgttttgatgtgatttttttgattttttaaagatgtatagattagatatggtggtggtggtgggagaggggattttttgtgtttttggattttagggttgtttagatttttggagaggaagttaagtgtttttttgtttttttttggtattttatttaaggtgattagtttagaattggtttttggaagtgtttgggtaaagattgtgaagaagaaaagatatttggtggaaatttgtgtgtttggggtggtggaatttggggaggagagggagggattagataggagagtggggattattttttttgtttttaaattggggtagttttttgggtttttgatttttttatttttgtgggtaaaaaattttgtttttattgggtttatgtaatttttttaaggggagaggagggaaaaatttgtggggggtatgaaaaggtggaaagaaatagttattttgttatatgggtttggtttttagttttataaaaaggaaggtttttttggttagtgattaattgttatatgatttgtagtgagtgttaggagtatgtttaggaattttttagtagtgttttttttagttttatagttagatgtttttagatagtaaagtttatttttgtgttgtgttttgtttgttgttgtgatgtttgtttgtgttttgttgttgtgtgtggttttggtgtttagttatataggtgagtatttggtgttgtgtattggggattttggttttatgtatttgggtagagtttttgttttgattttttgggtttattttagtattttgatttttttttgaatagagaagttatgtgatt

SEQ ID NO: 211 - DNA, 4511 bp, Artificial Sequence
  chemically treated genomic DNA (Homo sapiens)
ggagtatttgaatgtggaaattgaggtgttagtttaaattgtttggttggttttagttatagttggataatgtttggtttaggtttattataagttatatagttgttttttttgtgtttaatttgtttgtgatagaaattaagggggttttggtatttagtatttaggtggtggaattggggttttatgtatggttttgtgggtaggtttttggttaggatttgtggggagttatgtagttaggagggtggggttgtttattgatttaggatgtggtaatggattggggagggtggagttttagtgattgtttttttttttgtttgttggtattttttggtttttatttggttttggtgtggtttgtgagttagtgaggtttgtgtggtgaagtattgtttgagttttgagtttgagtttttttggttgtagtagttattgtttgttgtgttgttttaggttattttgaaagaaggtgtttttgttttgtttatagttgtatttgtttgttttttagttttgtgtgtttgtagttgttaattattgttttggttgtgtgtgtgtgtgtatgtgtgttagtgtgtgtgtgtgtttgggttagagttgtgttgtaattgttaagattgaaatgtagattgttgggatttagtttttgttttattggggtaggaatgttggggtggggatatgtatgttttgtttttaggaatgattttattgttttggagttttatttatagattttatttattatagggaatgggggtgggtgttagtgtttgggtaagtgtataagagtggtttttggttggaggtgagggtgggaaggtgtgggaagtgtgtgtgtgtggagtttgggttagtttgggtttgggtttgtttgtagtgggtggagtatttgtggagttggtaatttaggttttttttttagtttttgtgtagaattagtttttttgtgttgttgggaaattggtaattagaatgttttttgtgtgtggtatttaggtagtttttgagaatgtttgtattgtggtttgtttatttttgttttttttatatgtttttggttttgtgtttattatgtttgtgttttgttttattgtgggtttttagtttaggttttggggtttgtaatagtttaggtagatgagtgtgtggtagtggtagtggtaggtgaatttgtaatttgtagagaggtttggtggtgaggtggaggagttttaggttggggaaatgttttggagattgaagggaagttttagggagagggttgttgtttgttaggttttgtaggtttgatttattttagtgggttattttatattgttatgtggattttaatgttggttatttgggtgtttggaaattggttggaaggttataggtagagaggtttgtttaatagttggatttttattgtttagtatagaattttttttttttttattggtaattaaaaaaataataataaaaaattgtgttttgtttttgttatttaggttggagtgtaatggtgtgattttggtttattgtaatttttgttttttgggtttaagtgatttttttgttttagttttttgagtatttaggattataggtgtttgttattatgtttagttaatttttgtatttttagtagagatggggttttattatgttagttaggttggttttaaatttttgattttaggtgatttatttgttttggttttttaaagtgttgggattataggtttgagttattgtatttggttttttattgggaatgtatatggaatatatttgtttatttatttgaaggaaaaattaaatatttttaatttatgtttgttttgtggttgttatttgtttttattttttttagattaagatattggtttttatatattttaattttttgtttttatttttttttttatttattttagttaggtttgtttttttttttaggaaattgtttgggatagggtttttagtgatttgtgtattattaaatggaatttagtgttttattttttatttttatttttttagtattatttgaagtttgttttttttgatttttaggggttatatttttttagttttttttttattttttgtagtttttgtttagtttttttgtagattttgatttaatttttatattttatgatgaagtttgggtttagttttgattattggtttggtttgtttatatttatttgttttagatttatggttgaaatattgatttaaatttttagattagattttttgtgttagtatttttattaggatgtttaaaagatgttttaagtgaatatggttaaaatttaatttttttttttttagttttattgttatatttgtttagttttttttttgtagtaaaaatggttattaggtttttagttattggagataaaagtttaaatttatttttgattttttttttgtttttatttttgataaatatgtttaaattattttgttttttatttttatggttattttatttttttttgagaatgttgtaatgttttagttttgttttttttttttttttttttttttttgagatagagttttattttgttgttaaggttggagggtagtggtatgattttggtttattgtaatttttgttttttgtgtttaagtaatttttttattttagttttttgagtagttgggattataggtatttgttattatgtttggtttatttttttttattttttagtagatatgaggttttattatgttggttaggttggttttgaatttttgattttaggtgatttatttgtttttgttttttgaagtgttgggattataggtatgagttattgtgtttggttttttgtttattttttgtattttgttataattttgtgttttttttagttgaatttgtgatgtttttttgtattggatgagagggtttttatgtatatatagatttgggatattatttatttataagtttttaaataggttagagtagtgatgtttaatttagattttatgttataataatttggggagtttttaaaatttattgatgtttagggtttatttttagtagttgatttaataggtttgtggtgggatttaggttagtggggaggattgtaaaagtatttttggtgattttagttggtgtttatttaggggagagtaatttttgtttgttggtgatttttaggggtgtagaaggattgttgggtgtgtggttgtgtgtatattttagtatttgatttattgggttagaaaagggtgtttgttaaataaagatttaataaaatttttgtttgtagggggtttattaaaggttttaaatttttttaggtttttttttataggtggtaatttttttttattttaaaggttttggagggggttatgagtgtttgagaagaggtaagtttgggaagatggattttgaggatagtaggtataaatttttttttaagaagggttaaggtattttaaagataagaaatttaaaattagtgtatttttatatataagtagttatttttgtttatttgtggtttagatatgagtggagtgtgataagggataaattatttttgtgtattttttagtgatggggtgaaagtaatggatttagtttttgggagttgtttttgttgattttttttgttgtgatttgatttgtggtgattgtgttgttttttggttgttttttttgtttttgtaggtgtgtggggttattatttatgtgtgtattgtaggtttttgtgtatgatgttttagatgaagttgttatagaggttgtattatgtgtgtgtggtgggttttgtgggttggaagtggtggttatggttagggattagttgttgtgtggggttgtatgtggtgttttgtgtgatgtgtagtgtgttggtatgttttagttgggtgtggttttttttagtgtgtttagtgggtgttagtttttgtagtttaatgagtttaggtttttttgatatggtttggttgggtttgtgttttgttggttttgggtgttagtaagtgtgggttgggtggggttatagggtgggttttgattttagtgttttttttaggatttagattgggtggtgggaaggagttgaggagagttgtgtaatggaaatttgggtgtagggattgtggggtttgaaggtggggttgggtgtgtttttgtagagttttttttgttttgttttttttttttttttttgttttttttttatattttattttggatggttataatgatggtgattgtaaagtattatgtggagatatttgtgtttttggaggttagttttattgtgttagaggaagagggtttttatatttggttttggtttttttggtttggtttgttgaagtaatatatttggtttatttattgggtggggtaggaagttttgagtttttatttggggtgaggaggagggagattggttagtagttttattgtttgttttgttttttattgtggagattggggttttggtagaggttggattgtg

SEQ ID NO: 212 - DNA, 4511 bp, Artificial Sequence
  chemically treated genomic DNA (Homo sapiens)
tatggtttagtttttgttggagttttagtttttgtagtggagagtagagtgggtggtaaagttgttgattgattttttttttttttattttaagtgaaggtttgagattttttgttttatttagtgggtaggttaagtgtgttgttttagtaaattggattaggagggttagggttggatgtggggattttttttttttagtatagtaaagttggtttttagaaatatgggtatttttgtgtggtgttttgtggttgttgttgttgtggttgtttggggtggggtgtgaggaggggatgaaggagggaaggaagggtaaggtggggggggttttgtgagagtgtgtttagttttgtttttgggttttatagtttttgtatttaggtttttattgtgtggttttttttagtttttttttgttgtttagtttggattttgggggaggtgttgaagttggggtttgttttgtggttttgtttggtttgtgtttgttagtgtttaaagttagtgaagtatgggtttaattgggttatgttgggggagtttgagtttattgagttgtgggagttggtatttgttgggtgtgttgggaagggttgtatttggttggagtgtgttaatgtgttgtgtattgtgtggggtattgtgtgtaattttatatggtagttggtttttggttgtggttattgtttttagtttgtggggtttgttatgtatatgtggtgtgatttttgtggtgattttatttggggtgttgtgtgtaaaggtttgtagtgtgtgtgtgagtagtggttttgtgtgtttatgagagtggaaggggtagttaaggggtagtgtagttgttgtgggttaagttgtggtagagggggttggtggggatagtttttgaggattaggtttgttatttttgttttattgttgaagagtgtgtgaaaatggtttattttttgttgtattttatttgtatttgggttatagatgagtagaggtggttgtttatatgtaaaaatatgttgattttaagttttttatttttaaaatgttttggttttttttgagaaagggtttgtgtttattgtttttggagtttatttttttaggtttgtttttttttaaatatttatgattttttttagaatttttagggtgaagggaaattattatttatgggagggagtttggaaaaatttagaatttttggtgggttttttgtaagtaggagttttgttgagtttttatttagtaaatatttttttttgatttagtgaattagatgttaaaatatgtatgtagttatatatttagtagtttttttgtatttttgggaattgttagtaagtaaaggttgtttttttttgggtagatattagttggaattattaggggtgtttttatagttttttttgttagtttggattttattgtagatttgttgaattaattgttgggagtggattttaggtattagtaaattttaaaaattttttaaattattgtaatatggagtttgggttgagtattattgttttggtttatttaggaatttgtggatggatagtgttttaggtttgtgtgtgtatggagatttttttatttggtataagaggatattataaatttagttggggggagtataaagttgtgatagaatgtaaagaatgaataaggggttgagtgtggtggtttatgtttgtaattttagtattttggaaggtggaggtgggtggattatttgaggttaggagtttaagattagtttggttaatatggtgaaattttatgtttattaaaaaataaaaaaaaatgagttaggtgtagtggtgggtgtttgtaattttagttatttgggaggttgaggtgggagaattgtttgaatataggaggtggaggttgtagtgagttgagattgtgttattgttttttagttttggtgatagagtgagattttgttttaaaaaaaaaaaaaaaaaaaaaaagaataaggttgggatattgtagtgtttttaaagagaaataaagtagttatggagataagaagtaggatgatttgggtatgtttattagaggtagagataagggagaaattaaagataagtttgggtttttgtttttagtaattgggagtttagtggttatttttgttgtaaagaggaagttgggtaagtgtagtagtgaggttgaagaaaagggaattaaattttggttatgtttatttgaaatgttttttagatattttagtgaaggtattggtatggaggatttagtttgagggtttaggttagtgttttagttgtggatttggggtagatgaatgtagatagattaggttagtgattaggattgagtttagattttattgtgagatatggaagttgagttagaatttgtaaaggagttgagtaggagttgtagggggtaggaggaaaattgggagagtgtagtttttgggagttaaagggagtaagttttaaatgatgttgagggggtgagaatggagaatggaatattggattttatttggtagtatatagattgttgaggattttgttttgggtagttttttggaggaagaggtaagtttggttggagtgggtagaggggagagtgaaggtgaaggattagagtgtatagagattagtgttttggtttgaggggagtagagataggtgataattatagggtagatgtaggttaaaggtgtttagttttttttttaagtaaatgggtagatgtattttatatatgtttttagtgaagggttgggtgtggtggtttaagtttgtagttttagtattttggaaggttgaggtgggtggattatttgagattaggagtttgagattagtttggttaatatggtgaaattttgtttttattaaaaatataaaaattagttgggtatggtggtgggtgtttgtaattttaggtatttaggaggttgaggtagaagaattgtttgaatttaggaggtggaggttgtggtgagttgaaattgtgttattgtattttagtttgggtgataaaagtaagatgtagttttttgttgttgtttttttaattgttaatgaggaaaggggaagttttgtgttaggtgatagagatttaattgttgagtaggtttttttgtttgtggttttttggttggtttttagatgtttaggtggttaatattagagtttgtgtagtagtgtgaggtaatttattgagataggttgggtttgtggagtttggtgagtagtggttttttttttggggtttttttttaatttttgggatatttttttgatttggagtttttttgttttattgttaggtttttttgtagattgtaagtttatttgttattattgttgttgtgtgtttgtttgtttggattgttgtgggttttgggatttgggttgggaatttgtggtggagtgggatatgaatgtggtgagtgtggggttgagggtgtatgggaagggtgaggatgggtaggttatagtgtaggtatttttgagggttgtttgggtgttgtgtgtaaggagtgttttaattgttgattttttggtggtatagagaggttaattttgtgtgggggttgggaggggagtttggattgttggttttgtaagtattttatttgttgtaagtggatttgggtttaggttgatttaggttttgtgtatgtgtattttttgtatttttttgtttttgtttttggttagaggttatttttgtgtgtttgtttggatgttggtatttgtttttgttttttgtggtaggtggggtttgtgagtggagttttggagtgatgaggttatttttgggggtgaagtgtgtgtgtttttgttttggtgtttttgttttaatgagataagagttagattttggtgatttatgttttagttttaatggttgtggtgtggttttggtttgggtgtatgtgtatattgatatgtgtatatgtatgtatgtgattggggtggtggttggtggttatggatgtgtaggattgggggatgggtgggtatggttatgggtgaggtggaggtgtttttttttgaaatgatttggagtagtatgatgagtagtggttattgtagttaagaggatttggatttggagtttgagtagtattttattgtgtgaattttgttagtttgtaggttgtgttgggattaggtgggagttagggggtgttggtgggtgggaggggaagtggttgttggagttttgttttttttggtttgttgttgtgttttgggttggtgggtagttttatttttttggttatgtggttttttgtgggttttggttggggatttgtttgtggaattgtgtgtaagattttgattttattgtttagatgttgggtgttggggtttttttggtttttgttatagataggttgaatatggaaaaagtagttgtatggtttgtggtagatttgagttgggtattatttagttatgattaaagttgattgagtagtttggattagtattttgatttttgtgtttgaatgtttt

SEQ ID NO: 213 - DNA, 1775 bp, Artificial Sequence
  chemically treated genomic DNA (Homo sapiens)
atattgagttatgaaatttagagtaaaagtaaaattttttaatggaatgtttatgtaaatattagaaatataataaaataaggtaaagtttgttttttaaaatgttgtttattatattaaaatataattttgttttttaaatagtgagtaaaattaaattaattttatttttttaaatagaagtttatttaaagtttttttataaaaatgatatttatttgatttaatattgtttttttaataagaataatatgtagggtgttagagggtagttgttggatttttttttagtaaataaaggagattagttagagtttagtttggtttgtttaggaaaggaggaatgtagtttgttgatatggttaaggaatgttaattaatatattttaaaatttttattattttgtttgagatgtgtatatttttttaggtttttaaagtttaattagaaagtgtatttaattttattgttattttatttatagtggggaagtttattgaggaaaattatagggaaataaaatgttttttagttatttatattagtataattaatttagagtttatggtataaattaaataagttaatttgttagtgttttgaatgaagatatttaattaaagtatgtattttttaattttttagtagtttttaggatagttggttttggtgattgttttttggttttttattgtttttaatatgattggttttttattgtaggattttaaataaaatgagataattaaattatattttgagtgaaggggtgtttattttgtagataaatatattggttttgttttttttaaaatgtggatatgtgttttttttgtattagggggggttttttggtgtgtgttttgttgttatttgttgaggaaagtgagtgtattttttgtagtttaggttttgggtgttagttttgttttgtagttttagagtttgttgtagtttgggtggtttttttttggtttagtgtttgttgtttgttttttgttttgtaagttttaagaggtagttattttttgtagtttttgtgtttgtaattgttttttggtgggggagtgggtgtttaaaaagttagtagttggagaaattgaaaagattataagtgatttaatgataagtttttttttttttttaaagattgagaggagggtagaggggagtagtgtttgagtttatgtgattgagttagggagtttgatggttttaggaatgtttgatgttgtgtgtgatttttaagtgggagtatttttgaattgatttttggtttatttataaggatagtggtgtatagatggtgttttttgtagttttagttttagatttaagaggtttggagtagggtttgagaatatgtatttttaattaggttttgggggatgttgatattgatatagttagtttggggattatattttgaggattatgtttttagtttttgatttatataagtgttatttagaatagatgtttgattttaaggagttagtggtgaaattagagaggttttgggtttgttaaatttttagtagtaaatgtaattttgggttttggagtggtaaagttgtggattagaggtggagggagtgggtttttagtttttaagaggttattgggaaggttttttgtgttagattaaagattttaggtatttttttgaatttatttgaagtggtattggggagatttgtgtttttggttatggtgtttttttttgttggaggtatttgtttatttttttttttgggtgaaggttttttgtgtt

SEQ ID NO: 214 - DNA, 1775 bp, Artificial Sequence
  chemically treated genomic DNA (Homo sapiens)
ggtgtgaggggtttttgtttgagaagaggggtgggtaggtgtttttagtggagaagggtgttgtggttggaggtataggtttttttggtgttattttaagtgagtttgaggaagtatttgggatttttgatttaatgtgaaaggtttttttagtgattttttgagagttgagaatttattttttttatttttagtttatggttttgttattttagggtttgaggttatgtttgttgttggggatttgataaatttaaagtttttttggttttattattggttttttagaattagatatttgttttgaatgatatttatgtgagttaggggttgaggatgtgatttttgaagtgtggtttttagattggttgtattagtgttggtattttttaggatttggttggaaatgtatatttttaggttttattttagattttttaaatttgagattggggttgtggggagtgttatttgtgtgttattatttttgtgggtggattaggagttggtttgagggtgtttttatttagaggttatgtgtggtgttgggtgtttttgagattgttgggttttttggtttggttatgtgggtttaggtattatttttttttattttttttttggtttttaaaaggaagaaggggtttattgttaagttgtttgtgatttttttagtttttttagttgttggttttttggatatttatttttttgttaggaggtagttgtaagtgtggaggttgtgagaaataattgttttttgaaatttgtagggtgaagagtaggtggtgagtgttgggttggggagggattatttgagttgtgatgggttttggggttgtggggtagggttggtgtttggagtttgagttgtaggaggtgtgtttgttttttttaataggtggtggtggggtgtgtgttgggagattttttttaatgtgggaaaagtatgtgtttgtattttagagaaggtaaggttggtgtgtttatttgtaaggtaagtgtttttttgtttgaggtgtggtttaattgttttattttgtttgaaattttgtggtgagaaattagttgtgttgagaataataaaagattaaaaaatgattattaaaattaattgttttgaaagttattggaaagttggaaaatgtatgttttgattaaatgtttttatttaagatattggtaagttaatttatttagtttgtgttgtgagttttgggttgattgtgttaatatgaataattgaaaaatattttatttttttatggttttttttgatggatttttttattatgggtgaaatgataatggagttgaatatattttttgattgaattttgagggtttgggaagatgtatatgttttaggtaagatgataggggttttaaaatgtattaattggtattttttagttatgttagtaagttgtgtttttttttttttgggtagattaagttaagttttaattggttttttttatttgttgaagaggagtttaataattgttttttaatattttgtgtgttatttttattggaaggataatattaagttaagtgaatgttatttttgtgaaaaaattttgagtggatttttatttaggaagataaggttgatttaattttatttgttgtttaaaaagtaggattgtgttttggtgtggtaggtaatattttggaggatagattttgttttattttgttatatttttagtatttatatgggtattttattagaaagttttatttttgttttaagttttgtaatttggtgt

SEQ ID NO: 215 - DNA, 1223 bp, Artificial Sequence
  chemically treated genomic DNA (Homo sapiens)
tttatgtgttttatttggggtttggagtaaataaaattgatttaaaaataattttgaatgatagaaagggggtattttttttatttaagggggtgaggtaggttgaagatgggtttttattttttttaagattatggagggtgttggggtgttattttagttgtgaaaaagggatttaggatttgtagatgttggtgaggaataggggtgtggagtatgagttggttttgtattatgttttggggtttttagtattgaagtgtttagtattatgtagagtagttgggagtgggttttgttgggtggggttgagttgtgtgtgatttttggtgtgtttggggaggtttagataggggtggtttttttggtttttgtttttgtgggttttatgatattgtattggtttgtgggatggggtggggttgggtgagggggaggagatagttttatgttttgtgatttgtggtgatttttatgtggaatttttttgtggtaatttgaagtattgtgtttgtgtgttgtagtagtgtttggtggtggtggtagtttgtttgtgggtgtgtgaagggagatagtgtggaggttatagggtatttgttatgatgagtagtattttagttaagattgtggagatagaagtagaggtaatggatgtagttggtggtttatttttagtttgagtattttttttttggtggtgttgtttttttttgtttttttttgagttgtgttaggattgggtttagattttgtgattttttttagtgaggtttgtgttttgattgttttttgttatgattaggagtttttgattttttttagttagggttttttttttttttgttttgtgtttatgtttttggatttttttttgtttgggtttgtgttttgtatttttgtattttaggtttttagtttgtttttttttttagtgtttggtttttgttttgatgttgtttttttttgttttgttttgagaaatattgaattttgttttttattttatttttgatttggttagatagtttaggatttttttttattattttttgttgtgttttttttattttttttttttttagtgtttattttaatgattttttgatttagagtatttgtttttggtaattggatttggaagtaaaatgatatttgtgtgggagtagtttattttgtttggatagtgtgtgattttattgtgtgtggttttgagagtgttttat

SEQ ID NO: 216 - DNA, 1223 bp, Artificial Sequence
  chemically treated genomic DNA (Homo sapiens)
gtaaagtgtttttagggttgtatgtaatggaattatatattatttaggtggaataaattgtttttatatagatgttattttatttttagatttgattattgggagtaaatattttgaattagggggttattagggtagatattgggaaaagggggaataagggggatgtagtgaaggatgatgaggaaagattttgaattatttgattaagttagagatggaataagggataggatttagtgttttttagagtaaaatggaaagaaataatattagaataggagttaaatattgggagggggaatggattaagggtttaaggtgtaggggtgtggaatgtgggtttgggtaaaggggagtttgagagtgtagatgtgggatgaggggaaagggggttttgattgaggagagttggggatttttaattgtggtagagggtagttggaatatgggttttgttgagagaagttgtggaatttaggtttggttttgatgtggtttaaaggagaataggaaggagtgatgttattaaagaaggaatgtttagattaagagtgaattgttagttgtgtttattatttttgtttttatttttgtgattttagttaaggtgttgtttattgtggtgagtattttgtggtttttatattgtttttttttatatatttgtgggtaaattgttattgttattaggtgttattgtagtatgtaggtgtggtattttgaattattgtgagagagttttgtgtaggggttattgtgagttgtaaagtgtggggttgtttttttttttttatttgattttgttttgttttgtgagttagtgtggtgttatagagtttgtgggagtggaggttagagaggttatttttgtttgggtttttttgagtgtgttgagggttgtgtgtagtttggttttgtttagtgggatttgtttttagttgttttgtatggtattgaatgttttagtgttggagattttagggtgtggtgtaaagttgatttatgttttgtatttttgttttttgttagtatttgtgggttttgggttttttttttatagttggggtgatattttgatgttttttatggttttggagggagtagagatttatttttagtttgttttatttttttggataaagaaaatgttttttttttattatttaaaattatttttaggttggttttgtttattttgaattttgagtagagtatatggg

SEQ ID NO: 217 - DNA, 2183 bp, Artificial Sequence
  chemically treated genomic DNA (Homo sapiens)
aagggagaaggatgggggtgttgtttggtgattgtttgtgtgatttttttaaggtggtgattattttttgggatttgttttttagttgtgttgtttgtatttgggttttgtgatttttttttgttttttttttgttttagtgatgttaagatgttgaattgtagggatgaggttttggggataaagttattttgtggtgtttttttttgttaagttgtgggtttttggtggttagaaagtgttttaggtttatttttgtgggtttggttttttttttttatttaaggttttggggttatgagttttttattttgtgttttttttgtgttttttttattttaaattttagtagtgttgttgttttttttggaaataagtttgttgagtaaaggtggaggaaaattttgggttttttgttttgattggtttttttttgttgagtggggtgaggtagtgattggttgttgggtgttgttagttgttgaggttagagttattgttggggaagtgtagttgggtttgggtgttttggttgttgttgtggttgtttggttagtgtagttgggtgagtttgtgtgggtgttgttgttgtttttgttgttgtttattttgttgtgttgttggtgttgttggttttgtaggtggttgttggggaggggtggttgagagagtggagtatgaggaggtgggggtggtagagaagtgatgttggtgttggggattggggtagtggtagtggagtagtagtatttttgggattttggttgtagtgtttttgtggtttgtgtgttagtttagtggttggagattatgtgttttgtgggtaaggttttgtttggtagtgtttgtgatgtttttgggatggttggtgtggtttttgggggttatgaggtgtgtggtggttggggtattttgatgaaggtgttgggatttggattgtgtgttttgatgttgggttgtgttattgtttgtgtttgtgtggttttagttggtgtgtttttttttttgtgtttatagattttgatagtgtggggatggtattgtgtgagtgtggatgtggatgtgtgtgtgtgtgtgtgtggtttggggtattttgtagtgagaatagtgggttttttttgtgtggtttgatgttttttaaggatttaagttgggttggagtgagtaggatgttgttggtttggtgggaggtagaatgtatggagtgtatgggaaagtttattgtggtttgtaaagagttgagtaaattgaattttattgtggtgattaaaaggagttgtggatttggtgtgttaggggagaggtgtgttttatgaggttttttaaagttttattttgttttggggattttggaggggaagggaagagagggaaaagtaattgttggtttatattgttgaagaaaaggaggaaagagaagttgggggtgggggtgggggtggaggttatttttgggggagtggtgatttttaggtgtttgaagttttgtgtgggaggtttgttatatttttttggagtgtagatttgaggatggagagttttattttgaggtattggtagtggttttttttgtttggtggtggtgtagggtgtagtgggatagtttggtggaggtagagtggggttttgatgtttgatggtttggtgtttaggtggggttattgtttttttaggttgttttggtttgttgattttttaggttgagatttggtttggtgtgtttttggtagttgttaaatgtttggtggttttgttttttgataaagtttaggtttgttggggtttggtttattagatttaggatatgttaattatgtagagtaattaggttagggtatttagttgtttttagagtgtttttgttttatattagattattttatttgataaagttgttgagagttttatttgtgttgtaaagttttttgtagaaggtgaattttttgtgttgttgtaaatggatggtgttattgggttagatttgaatttttgtagtttagtgtagtgggttttttatttttgtttaggatgtataaatttatttttggtgattgttttttatgtggttttttgtttttgtgggagtatttgtttaggaaagtttttgaaatattttaatattaaggagttttttttattgttttagatggggtgaggttttggtatttgattggtgttggggt

SEQ ID NO: 218 - DNA, 2183 bp, Artificial Sequence
  chemically treated genomic DNA (Homo sapiens)
attttaatgttagttaagtattggagttttgttttatttgagatagtggggagagttttttagtattgaggtattttaagaatttttttaagtagatatttttatggagataaggagttatatagaaaataattgttaagagtaagtttgtgtgttttgagtagggatggagaatttattgtattgaattatggagatttggatttggtttagtagtattatttatttgtagtagtgtaaagaatttgttttttgtggaaggttttgtagtatgggtggaatttttaatagttttattaaataagataatttaatatgaaataaaaatgttttggaggtagttgggtattttaatttggttattttgtgtggttaatgtgttttaggtttgatggattagattttagtgggtttgaattttgttggaaagtggagttgttaggtatttggtagttgttagaggtgtattaggttgggttttaatttgggaggttagtgggttaaagtggtttggggaggtagtggttttatttggatgttgggttgttgggtgttggagttttgttttgtttttattaagttgttttgttgtgttttatgttgttattaggtaggaggagttgttattagtattttagagtgggattttttatttttaagtttgtgttttagaaaagtgtagtaagttttttatgtggggttttagatatttaaaagttgttatttttttaagagtaatttttatttttatttttatttttaattttttttttttttttttttttagtaatgtggattaatagttattttttttttttttttttttttttttgaagtttttggggtaaagtgggattttggggagttttgtggaatgtgttttttttttggtgtgttaggtttatagttttttttaattattgtaataaagtttaatttgtttggttttttatgagttatggtggatttttttgtgtgttttgtgtgttttattttttgttgagttaatagtattttatttattttagtttagtttgggtttttgaaggatgttgggttatgtagaggggatttattgtttttgttgtaaagtgttttaagttgtgtgtgtgtatatatgtatttatatttatatttatataatgttatttttgtgttgttaaagtttgtgagtgtggaagggagaatgtattagttggagttgtatgggtgtgggtagtagtatagtttagtgttgggatatgtagtttgggttttaatatttttgttgggatgttttggttattatgtgttttgtaatttttaaagattatgttagttgttttgggggtgttgtgggtgttgttggatagaattttatttgtggggtgtgtggtttttggttgttgggttggtgtgtgggttatagggatgttgtagttagggttttgaagatgttgttgttttgttgttgttgttttgatttttggtgttagtattatttttttgttgtttttgtttttttgtgttttgtttttttggttgtttttttttggtggttgtttgtaagattggtagtgttggtggtgtggtggggtgggtagtagtagaggtggtggtggtgtttgtgtgagtttgtttagttgtattagttgagtagttgtggtggtagttgaagtatttgagtttggttgtgtttttttggtgatggttttggttttggtgattgataatgtttggtagttaattgttgttttgttttgtttggtggggggagattaattagagtggaaggtttaaggtttttttttgtttttgtttagtgggtttgtttttgggagaggtagtgatgttgttggggtttgggatgggggaggtgtgggaggggtgtaggatgggggatttgtggttttggagttttaggtgaggagggaaagttgggtttgtaggggtgggtttggggtgttttttgattgttaggagtttgtggtttggtaggaaagggtgttgtggggtgattttgtttttagagttttgtttttgtggtttagtgttttggtattgttggggtgaggggggagtggggaggggttgtgggatttgagtatgaatggtgtggttggagagtgaattttaggaggtggttgttgttttgaaggaattatgtgaatagttattagatagtgtttttgtttttttttttt

SEQ ID NO: 219 - DNA, 8030 bp, Artificial Sequence
  chemically treated genomic DNA (Homo sapiens)
tttgtgtaattttagttagtttgaatttttggaggtaaatagagtgtaatttgttttggaagaattttgttatgtttaaggttttatgttgggtgttggtttttttgtttttaattatttttttattttgatttggattgtagaaatttttaattttttgttttttagttttatttttatttttagatttggggttgttaaataatggaaattttaggaagatgtaggtgtggtttttaaagttttggtttgtgagtgtttttaggttggttggggtgttggtttttttagaaataaggtttgaatatgtaggtgttagttaggattttttgttgtttgtttattgttgttttttttttgggatttgagagaagtgggagtgtgtgtgtgtgtgtgtgtgtgtgtgtgtgtgtgtgtgtgtgttttgtgttaggagaaaggtttgtggttgttgttttagttggtttgtttattttttgtttttaggagaagtttgtttatttgggatattagtgattttttttatttttattttattggttttatattttttttatttttttttaagttgttgatgtagaaagtatttggttattttgaaatggtagtttttggaattttagttttgttttgtaatttagtagggttttttggaagttttataattgagatttatgggtttattgggtaattaaatgatgttattgtgttaattttgtatgtattattgttgtttgtgttgtttgtgggttgttggttggttgtagtttgttggtgatgagggtattatagttgttttgattgtgtagattatgtatgttttggttttgggaatttattatgtattagaatatattagtgtttgtattttaaaaggttaaattattggtttttagttagggatttttggtaagtggtttgttagtgatgagtgtttgtttatattggtatatagtggagttttttgtttttggtttatttgtttttaggaaagttttggggtgaggtgaaggtgattgaagtaatgtttttttttttagattgtagttgtttaggggggatatagtatggtattttttattgaattttttttgtttgtttgtattttagtttttttttttttagtgatttttttatttttttttttttttttttttttgatgtttgattttagtagtaaaggaggtaaaaaaggtattgagttgttagttaaatttgaaaagtgtggttttgttttttttatagttattggtagttttttgtggaaggtttgttttttggggtagttgtggttttggagtggttgtgtttggtgtttgttgggtgtggttttgttttaggtttgggagggtaggttggttgttttggtgagtggtagagtttttttggatagtttttgtttatttaaatagaagatgttggtgttggagtgggtttggatatggtgaggttgtgagttggtttgagtggtggggtttggtgatttttttttttttttttgttttttttttttttttgtatgtatgttttgtttgtttttattttgtttttattttgggtgagtttgtttgtagtttggggtgtatatttgtatgtgtatttttttttatttatttttgtgtttgtttttatttttgtagttgagttttgttatgtgtgttttgtttgtttgttggttgtttttgttgtttttgttgtttttgggttttgatggattgaatgaaggttgtttatattgtttattgatgttttattaaagatttagaaggttgtgttatgaatttggagttgataatggaaagtttgggtattttgtatgggttggttggtggtggtagtggtgggggtggtggtgggggtggtgggggtggtggtgggggtttgggttatgagtaggagttgttggttagttttagtttttattatgtgggttgtggtgttgttggtttgttgtggggttttttgttgtttttaattgtgtattaggagttgggtatggtggtagtggtggtagtggtggtgttgtgtttggttatggttattagtatggttttgattttggatggtggtgattattggtttgagttttttattttgttgtattatgttatgagtatgttttgtgatttgtttttgtttggtatgggtatgagtaatatttatattatgttgatattgttttagttgttgttatttatttttattgtgtttgataagttttattatttttatttgtattattatttgtattattattattattattattattagtgtttgtttggtaatgttagtggtagttttatttttatgtgtgatgagtgtgggtttttggttatgaataatttttatagtttttataaggagatgtttggtatgagttagagtttgtttttgttggttgttatgttgttgggtaatgggttaggtggtttttataatgtgtagtagagtttgtttaattatggtttgttgggttatgataaaatgtttagttttaattttgatgtgtattatattgttatgttgatttgtggtgagtaatatttgttttgtggtttgggtattttatttgtggttatgatgttgtatttgaatggtttgtattatttgggttatatttagttttatgggttggtgttggtatttagttgtgagtggttatttttgtttttattgggtttgtaggtggttatgttgggttagttggaagaaattaatattaaagaggtggtttagtgtattatagtggagttgaagtgttatagtattttttaggtgatttttgtgtagagggtgttgtgttggttttaggggattttttttgatttgttttggaatttaaaattgtggagtaaatttaaatttggtagggagattttttgtaggatgtggaagtggttttaggagtttgagttttagtgtatgtttgttttatgtttggtaggtaaggttggggttagttaggggttaggttgttgggaagagggttttgggtttggtgtttgtggtttaagtttgtgtgttgagttattttttttgatttttttttttttttttttatatatgttttttttttttttgtttttatttttttttttatttttttttttttttttgttttttttttatttttttttttttttttttttttttttttttattttttttttgtttttgagtttttattgattgatttttttttattttatttgttttttttttaatgtgttaatttttgttttatttttgatttttttaggtattgggaggtgggatgggggtgtgtgtttttttttaggagttttgtttttttaagatttatagaaattaggatttgtttttatttaaaattttatgtattttaagttttttttagataatatattttaattttttgggttgattagtttttttgtgtagaggtagttgagaggttttgttttgtagagggaaaagagttttttatttttttatttattatataggtaaatttatttggttattggttgaaggtatagttttgtttttgtggggaattggtggttaggatataatagtgtttttggagtttatttttggttttggtgttggtgtagggattttttgattgggtttgaggggtttgggttagttttaatgttattatttatagtgagggtagggtgtaaggttgagaaggttatatttattgttttgggaggatgtgggagaagagattgaggtggaaagtgttttgttttgtttattggttgtttttgttttggttttagtgtttgttgggatttgttaggatttgttggggttttgggagattttgagtatttgtaggaagaggtgttgagaaattaaaaatttaggttagttaatgtatttttgttgttggttgtaggttttgtttttgtattaagtgggtgttgattgtgtgtgtttggtgattgtggggaggattggtggtttgtgggaggggatgggtagaggtgtgggttatattgttttggagttggtttggttttttgtgttttttttagtggttaagttgtgaggtatagttttttattgttttaggagtatagaaattttttgtgtgggtggtgggtgtgtgagttagagggaaagatgtagtagttattgtgattggtatgtagttgtgtgtttttgtgtgtatggattttgtgtggtgtgtgtggtgattgtgttgtttttaggagtaagttatgggtttagaggggtaaaatgtttaggttttttgttgggaaggatatattatattttatggtaagttagggtgggtgattttttatggattgggtggaggggggtattttttaggattggtgggtggtttaggggaataatttgtggtggtgatgatttgtatagtgtgggttttgggatgtgtgtggttttgagttagttttgtatagtttgtttttggagttgtgagtttaggtttttatttttgattttttgggttttttttgtattgttgagtttagtttgtggggtgtatttgattaatgtttgatagggttggggaatgtgataggtagtaggtttatttgggtttggggagggggagtttttgttttgatagtatttttttttgttgtttgttggtggatttttatttttagttggtaattgttttgtagtgttgatttaagaaggtaaagaaaattaggtttttttgtaaagagttttttttaaattggtggattttggatattttgagtggatttagaaatttatgtaattttttttttttagtttattttttatttttttttatagttttttttgatttgttgttggtttggggtaagataaagtagttagtagagagtgataataatagtggtgggaaatgaattggagattggttgatagtttttaatattttgttatagatttttttgaatgttttaggttgtttttggtgggttttagtatttgttggttttttgggtattggggattagaaggaatttggtagttggttttaggggtatagttaaaggtaggatgatagttatttttttgtttattttagagtgttgttgtttttttatgttggttgtgtaaagaatatagtttttaaaaaatatgtgttttttgtttatataggtttgaaagtgatgaggaaagtaatgttttgtttattagtgagttttagtttttaaaatgattttaagtgttgttgagatgagaaagtgtggtattttgggggtttttagttttatttgtgtttatggtgtaagtttgtagggataggtttgggatagtattgtttatgttgttagattttttgtagaggattgttgaagttgtttttgtgggagatagaatgttttttttagtgagtggaaaaggtttgttgaggattttgttttgtttgagtatttaaatgtgtgtttgttttattattttgggttgaaaagggataagagttttagtttttttatttggttattttattagtaattataagtgtgttgagtggttattattatataggaggttttttagtttggggttagtagattagtttttttagatattgatgtagaagttgggattggtaagtaggtattatgtgtttggagtgttaggggataggagtaaatggagaagaaaagtggaggttttttttgtttggagtattgattggaatttttgttggtatgttgtagagggtttttgttgttgggttttgggggtttaataagtttagttgttttgtaggtggtttggttggatttttagattggtgtttggaagatattgtttttgttttttttttgttaaatttgtttttttttttttttttataggttataggtttttttttttttttattttggttttgtttttgggttttgttaaatagttaagtaggttggggtttagggggtttagaatgaagaggtttgatttggttagtgttggtaaagtttatttttaggtgaggttataatagaggtaggttttttttgtttagtttgttggtgtagttatagttaagggtggtatttgaaaggaaaagggagaaaattttggagaaatttagattgttttaatgttagattttagagaaattgattttaaatgtatggatttgtttggaaagggtggttaagtggtaggtggttgtaattttgtttggttgggtttttgtagaggttttttaagattagtttttgtagggtggtttttagtaatttgataagaggtggttaagataaatttttgtgggtttgagtatatatttttgggtgttgggttttagagatttttaaattaagtataaataagaagggagtgagagaatttaggttagaatttgtatgggtattttattgaggaaaagtgaggttttggtggtaggtatgtttttttttgatgtttgaaaattgagttgagtgtttgattatatttattgtagaggtttttgtttttagtgagtttggattttttagtggtttgtttggagttggtttttagtttttgttgtagtttgatgtatggtttttttttggtagtaagtttttagtggttagtttgaagttaattttgtttaggtggttgagggtttttagttaatttattatgatgttgtttgggttatttgatgtttgtagtggtgggatatggtttgggtagtgtgtagtggtttttgttaggggtattgtgtgtgtgtttgttttttgttgtgttggggatgtttttgggtgatatgggttgttgggtattttttaagttgaggaaatggattttttttgtagagttttgtgtttattttttaattttttattttgttttttgttgttagggtttttgatttagtttattttttttggtggtttagttagggattagagttggagaggttgaatgtaatttgtgttagtatggaatagatgatatgtttgtttgttagttgtttggatgaataattgaaaagtttgttgtagtttgtgttttgttaagttttgggtgttgggagaatatttttttaatatgtattagggtgggtgggagtgggtagaggaggtgggatttgagggaggagagtgaatttgagtaggagaagtagtttaggtagttaggtgtttttgatgtgagaggttgggtatttatttttattttaggttttttattgtgtggttatgttatttttttaaataaatgtgtatatggagggagattgatgttgataatgtttagaagattaaaagagtattaatgttggtaataataatgtaaatgtgtggatttagattttattgatttggaatttgatttggtgtgtttttagtaagtttgatggtgtgttttttttagtagagtgtttattagtgttatggttttgtggttttttagtggtgttgttttgttagttttgtgtgggtttttttgtttgattgtagttttttttttgtgaggttttagtttgttttatttttttgaggtttttttttttttttgtggggttttttgttttttgtatttttttttttgatttttgtattatttgtttttgtgtgtatatattgttatttgtgtttttggtgatttgtttgggtggttgggtttgtgaagttaatgtgttgaatggtgtttgagtttttttaattattttgtgtttggttgttgttattgggttttggtgattaagtttaagtttgaaaatgatgtggttaaagttgtttgttaatggtagagtttaattagttgtagatttttttttatttttattggtttttgtattaaaaaggtttatgtgtagattttttatgtaggtgtatttgttggataattaaatgtggttttagtaataaaagtttgagttttatttttttgagtagtaggttttgtgttggattggttgggtttaatagggagaattttgtgttttattttggttgggataggaagtaagagaagtaaattggggaatttttgttttatttttttttattttttggatgttttgggttgaggtttgggttattggtttattgtgggta

SEQ ID NO: 220 - DNA, 8030 bp, Artificial Sequence
  chemically treated genomic DNA (Homo sapiens)
tatttgtgatgggttagtgatttgggttttggtttaggatgtttagggggtgggaaggggtggggtaggggttttttagtttgttttttttattttttgttttagttaaggtaggatataagattttttttgttagatttgattagtttagtgtagagtttgttatttggagggatgaagtttaggtttttgttattagggttatgtttaattgtttaatgaatgtatttgtgtaaaaagtttgtgtgtgagtttttttagtatgagaattgatgaggataggaggggatttgtggttgattaagttttgttgttagtaggtagttttagttatgttatttttaaatttgggtttagttattagggtttagtggtaatggttaagtataggatagttaggaagatttgggtattgtttagtgtattggttttgtggatttagttgtttaggtggattgttggaagtgtaagtagtggtgtgtgtgtataggggtgggtggtgtagaggttgggggagggggtgtagagggtagagagttttgtgagaggaggagaaaattttggggaagtaaggtgggttggggttttgtgggggaggagttgtggttagatgggagaatttgtgtagagttggtgaagtggtattgttggaaaattgtggggttgtggtgttggtgagtgttttgttgggaagagtgtgttgttgggtttattggaaatgtgttggattaagttttagattaatgaaatttgggtttatatgtttatgttattgttgttagtattaatgtttttttaattttttaaatattattagtattgatttttttttatatatatatttgtttgagaaagtgatataattatatagtggaaagtttggaataaaaataaatgtttagttttttgtattgagggtgtttggttgtttgggttgttttttttgtttgggtttattttttttttttgggttttgttttttttgtttgtttttgtttattttgatgtgtgttgggaaggtgtttttttggtatttgggatttgatgaagtatagattgtagtgaattttttaattatttatttaagtagttagtaggtaaatatattgtttgttttgtattggtatgggttgtgtttagtttttttagttttgatttttaattaaattgttaggagaggtgggttgagttgggagttttagtagtgagaaatgaggtgggaggttggggggtgggtgtgagattttgtgaagggggtttgtttttttggtttgggaggtgtttagtggtttgtgttatttaaggatgtttttggtgtagtgggagataagtatgtatgtggtgtttttagtaggagttattgtgtattgtttgggttgtgttttgttgttgtgggtattaggtggtttaggtgatattatggtgggttggttaagggtttttggttgtttgaatagaattggttttagattggttgttgggagtttgttgttaggagagggttgtgtgttggattatggtggggattggagattagttttgggtaggttgttgggggatttgggtttattggaggtggaaatttttgtagtaaatgtagttgggtgtttggtttgatttttgggtgttggaagaaaatatgtttgttattgaggttttgtttttttttagtgggatgtttgtgtaagttttagtttgggtttttttattttttttttgtttgtgtttggtttagaggtttttggggtttaatgtttgagagtgtgtgtttgaatttgtagaaatttgttttggttgttttttgttaggttgttgaaaattgttttgtaagggttggttttggggaatttttgtgaaggtttgattgggtggggttgtaattatttgttatttagttgttttttttgaatgaatttgtgtatttggagttaatttttttgaaatttaatgttggggtaatttaaatttttttgaagtttttttttttttttttttaagtgttatttttggttgtgattatattggtaggttgggtaggaaggatttgtttttgttgtgattttgtttaagggtgagttttgttggtgttggttaaattagatttttttattttgagttttttaaattttggtttgtttggttgtttggtaggatttgggggtggggttaaaatgagagagaaagggaatttataatttatgagagaaagagaagaggtaggtttggtgggaggggggtagggatggtgttttttaggtattggtttgagagtttggttgagttgtttgtggagtggttgggtttgttaaatttttggggtttaatggtgagggttttttgtggtgtattggtggggattttgattgatattttgggtggagaaagtttttgttttttttttttatttgtttttgttttttagtgttttgagtatataatatttatttattagttttagtttttgtattagtgtttgaagagattgatttattgattttaaattgaaaagttttttatgtaataataattatttaatatatttgtagttgttgataaaatggttagataaaaaggttaaagtttttgtttttttttaatttagggtaataaaatagatatatatttgaatgtttgagtaaagtggggtttttagtaggttttttttatttgttggaggaggtattttgttttttatgaaggtagttttagtgattttttgtggaaaatttagtagtgtgggtagtgttgttttgggtttgtttttgtagatttgtattatgggtgtgggtggggttgaggatttttgggatgttatgtttttttattttagtaatgtttgggattattttaaaagttgaaatttgttaataggtgaagtattattttttttattatttttagatttatatgggtagaaggtatgtgttttttaaaagttgtgttttttgtgtgattggtatgagggggtggtagtgttttgagatgagtaggagaatagttgttattttgtttttaattgtatttttaagattagttgttaagttttttttggtttttggtgtttaagaagttggtgggtattaaaatttattagagatagtttgggatatttggggggatttatgataaaatgttaagaattgttagttagtttttagtttattttttgttgttattattattgttttttattggttgttttattttgttttgaattaatagtaaattagagaaaattgtaggagaggatgaaaaataaattaaaggagaaagattatataaatttttaaatttatttaaagtatttggagtttgttgatttgggggaggttttttgtagggaaatttagttttttttatttttttagattaatattgtggggtgattattgattgggaataggaatttattagtagatggtaaaggaaaatgttgttaaagtggaaattttttttttttaagtttgggtgaatttgttgtttgttatattttttagttttgttgggtgttggttgagtgtattttataagttgggtttagtggtgtgaggaaagtttgggggattgggggtggaaatttgagtttgtagttttggaagtgagttgtgtgaggttggtttggaattgtgtgtattttaagatttgtgttatgtaaattattgttattatgaattgtttttttagattgtttgttgattttgaaagatatttttttttatttgatttatgggaagttgtttattttggtttgttatagggtatagtgtgttttttttagtgggggatttggatattttgtttttttgggtttgtggtttgtttttaggggtagtgtagttgttatgtatattgtgtggggtttgtgtgtataaaagtgtgtaattgtgtgttagttgtagtaattattgtatttttttttttagtttgtgtatttgttgtttatataggaggtttttgtgtttttagaataatagagggttgtattttgtagtttggttgttagaggaggtataaagagttgagttggttttagaataatgtaatttgtgtttttatttgtttttttttgtgggttgttagttttttttgtggttgttaggtgtgtataattagtgtttgtttaatgtaaaggtggagtttgtagttggtggtagggatgtattaattaatttgaatttttaattttttagtatttttttttgtgagtgtttagggttttttggagttttggtaaattttggtaaattttagtaaatgttgggattggggtaaggatggttggtgagtaaggtaaagtgttttttattttagtttttttttttatgtttttttaaagtggtgaatgtgatttttttaattttatattttgtttttgttgtaggtagtgatattggagttggtttgagttttttaagtttggttagaaagtttttgtgttaatgttaaggttagagatgggttttaggagtgttgttgtattttggttgttggttttttgtgggggtaaggttgtgtttttagttaatgattaaataagtttgtttatatggtgggtgggagagtagagagtttttttttttttgtagagtaaagttttttaattgtttttgtatagggagattagttagtttggaaaattgaaatgtgttgtttaaaagagatttgaagtgtatggggttttgaataagggtaggttttggtttttgtgggttttggaaagatagggtttttagaggaaaatgtatatttttattttgttttttagtatttgggaagattggaaatagggtaaaggttggtatattgaggggagggtgaatgaaatgggggggggttggttaatgaaagtttagggataaggagagagtaagaaagaaaaagaaaagggagaagggaaagtaggggaagagtggaagagaaagagaaaatggaagaagaaataaaaatgagaagaaagaggatgtgtataggaaagagaaggaaagaattaagagaagtgatttggtgtgtagatttgggttataagtattggatttggagttttttttttagtagtttggtttttggttagttttggttttatttgttaggtgtaaggtggatatgtgttggaatttgggtttttgaagttatttttatattttgtggaaggtttttttgttagatttgagtttattttatggttttggattttggagtaggttggagagagttttttgagattggtatagtattttttgtgtaaagattgtttgggggatattgtagtgttttagttttgttgtgatgtgttgggttatttttttggtgttgattttttttagttggtttgatgtggttatttgtgagtttgatgaggatgagggtggttgtttgtgattgggtgttagtattggtttgtgagattgagtgtggtttgggtggtgtaggttgtttaggtgtgatattatggttgtaggtggggtgtttaggttgtgggataggtgttgtttattgtgggttagtatggtagtgtggtgtgtgttgaagttggggttgagtattttgttgtggtttggtggattgtagttgggtagattttgttgtgtgttgtggaggttgtttagtttgttgtttagtggtgtggtggttagtggggataggttttggtttatgttgggtatttttttgtagggattgtagaggttgtttatggttgggagtttgtgtttgttgtgtatgagggtgaagttgttgttgatgttgttggataggtgttggtggtggtggtggtggtggtggtgtggatggtggtgtgggtgagggtggtggaatttgttagatatggtggagatgggtggtagtggttggagtggtgttagtgtggtgtaggtgttgtttatgtttatgttaggtggagatgagttgtaggatatgtttatggtgtggtgtagtgggatggagagtttgggttggtagttgttgttgtttaggattgaggttatgttggtgattatggttgagtgtgatgttgttgttgttgttgttgttgttgtgtttagtttttggtgtgtggttggaggtggtggagggttttgtagtgagttagtggtgttgtggtttgtgtggtgggggttggggttggttagtagtttttgtttatggtttgggtttttgttgttgtttttgttgtttttgttgttgtttttgttattgttgttgttggttggtttgtgtaaagtgtttagattttttattgttagttttgggtttatggtgtagttttttaggtttttggtgaggtattgataggtggtgtaggtagtttttatttagtttattagggtttgggggtggtgggggtggtgggggtggttggtgggtgggtaaggtgtgtgtggtggggtttggttgtgggagtgggggtgggtgtgggagtgagtggagaggagtgtgtgtgtgggtgtgtgttttgggttgtgggtgggtttgtttggggtgggggtggggtgggggtggatggggtgtgtgtgtgggagaggggaggggatggggagggagggagggattattgggttttgttgtttgggttggtttgtagttttgttatgtttgagtttgttttggtgttgatgttttttgtttgggtgagtgggagttgtttagaagggttttgttgtttgttggggtagttaatttatttttttggatttggggtggggttatgtttgatgggtgttaagtgtaattattttgaggttgtagttgttttgggaggtgggttttttatgggaagttattagtggttgtggagggggtggggttgtattttttaggtttggttgatggtttggtgttttttttattttttttgttattggaattaaatgttaaggagagggagggaggagaaggtgggggggttgttggggagagggaggttggagtgtgagtgagtgagagagatttggtgaaagatgttgtgttgtgttttttttgagtagttgtgatttgggggaaggggtattgttttaattgtttttgttttattttaaagtttttttggaggtgagtaagttgggagtaaaagattttgttatgtgttagtatagataaatatttgttattaataagttatttattgagagtttttagttgggagttaatagtttagttttttaaaatgtaggtgttaatgtattttaatgtatggtaaatttttgaggttgggatatgtataatttatgtggttagagtaattgtagtgtttttgttgttagtgagttgtggttggttggtggtttatgggtggtgtgggtagtagtaatgtatgtaaagttaatataataatattatttaattatttggtgagtttataaattttagttatgaggtttttgaagagttttgttagattgtaaaataaaattagaattttgggagttgttgttttaaggtgattaagtgttttttgtattagtgatttggaaagaagtggggagagtgtagaattggtgaggtggaggtgaggagggttgttggtgttttaagtgagtaaattttttttgggggtagagagtaagtaaattagttgagatggtaattatggattttttttttaatatgagatatatatatgtgtatatatatatatatatatatatatatatatttttgttttttttaaattttgggagagaaatggtggtgggtagatgataaggaattttggttgatatttgtatatttaaattttgtttttgaaaagattagtgttttggttagtttgagaatgtttataagttaaggttttaaaaattgtatttatgtttttttagaatttttgttgtttggtaattttaggtttggaggtgggagtggaattgggggatagagagttggagatttttgtagtttgagttggggtggaggggtagttgaagatagagaggttaatatttggtataaagttttaaatgtaataagatttttttaaagtaggttgtgttttgtttgtttttgaagatttaagttagttgaggttgtgtaga

SEQ ID NO: 221 - DNA, 2225 bp, Artificial Sequence
  chemically treated genomic DNA (Homo sapiens)
tatttgggtgtaggtgggttgagtttgaaaagagagttagtgaagggagataggggtggggttgttttataggatttgggaaggtaatggaaaattatagttaaagggggttgttttttggtgggtaggggtgaattttataaagtatatttttaagggtggggagaattataaataatttttttaagggtggggaagattataaagtatattgattagttagggtggggtaggaataaattataatggtggaatgttattagttaaggttgtttttattttttttgtggatttttagttattttaggttatttggatgtatatttgtaagttataggggatgtgatggtttggtttgggatgtgatggtttggtttgataattattatttatgttatgtttattattttaagttttattattattattttatttattttattttattttttttttatatatttgtttttattttggagaggttagatgagttagattttagggaggtttagaagtgggtaaggggaaatgggaaaggaggaagatggtatgggtgtgtttggttaggggtgggagtgttggatggagtttgggataagaggggttttgtagttattggtatataatgtttgggagtttttgttggtgttgggattattttagtgagttttgggagggaattgaagatttttaattattaatgtatttgtttttaaaattgatggggggaaggatatgtttaggtttaaggatatgtgtaggtttggatgattttgggttattagggagtttttggagtattttgatttttagatgggtttgatgaaatgagtatttgatttagtaggtttgggtttgggtttgagaatttgtgttttttgtgagtttttgtgaggtaagtgttgtaggtgtggggttaggagttaggttttgtttttgtgtttggagttgtttttagtatagggtttgtgagttttatttttttgtggtgtggggtggggttgggtgtggggtgaaagaggtgaagtgagagtggaggttgtattttagtattgtgtagggattggtgagtgttgtttttgggggtagtgtttagtaattgtgttaggagtgtggagaagggtattgggagagtggtgtttgtggtggagattagtgttttggagtatgggtatgatgggggtatttttttggttgttagtaattaataataataataattataattatagtaagggtgttgatgggtgggtttggagtatgtttgattttggtttttattaggttgtttaggtttttgatgatgtattagaaatatttttttaatttgtggtttttttgtaggagaggttgggaaggggtgggggatggggtttgggggaggtttttgagggattttagtaagtggggaagggtgttgggaaagttttagatttatggttgtgtgggttatgagtttatttgaatgttgattattgttttttgttgatttttattttttgggaatgtgtgaaagtaaatttaagttagattgtggaggttgttggggagggaaggtttaaggagtttttgttgattttgttgaataaagggggttttgagttgggttgagatggggtatgtgtgggaagatttttgtttgttgtttttttttattgttttagtggatgttatgtttggggtttttttggtgtgtggggttgatgtatttttggggtttattgtagttggttgggattgtggagtgggtgtggtggatgaagggaggtaggatagttttgggggtggtagaaggagtttgggtatagttgagatttgtgtttttattttattaatatttatagtaggtgttgttgagttgggtaattgggatggtttaagttatttggttaaattttaaattatgtttgttattgggaagtagagtttagtgatgttaattgtgtttttatttttattattggtgttagttttaaagggtttttaaaatggttgtgttattttttagttttggattgtagttgttggttaggaattttagtgttatggtggatatgttttttttgtgtttttgttgtttatttgtttatttagtttaggggttttggtaggtagtagtgtatttggtttaaagggtaagatgtttttttttttatttataataaatttaaatattagtagggtttggggggaaaaatgtttttagaagaaaaggtgaatgttag

SEQ ID NO: 222 - DNA, 2225 bp, Artificial Sequence
  chemically treated genomic DNA (Homo sapiens)
ttgatatttatttttttttttgaaagtgtttttttttttaaattttgttggtatttaaatttgttatgaataaaagagagaatattttgttttttagattaaatgtattgttatttattaaagtttttgagttgggtgagtaggtgggtggtaagggtgtgagggaggtgtgtttattgtgatattgggatttttggttggtaattgtggtttaaggttgaaagatgatatagttattttaggagttttttgggattgatattggtggtggaggtagaggtgtggttagtattattggattttattttttagtaataaatgtgatttaaaatttaattaaataatttgggttattttaattgtttagtttggtagtatttgttgtgagtgttggtgggatgggagtgtaggttttagttgtgtttgggttttttttgttatttttgggattgttttgtttttttttgtttattgtatttattttatgattttggttaattatgatggattttgagggtgtgttagttttatgtgttggggaggttttaggtatggtatttattggggtggtgggggggaatagtgggtaggggtttttttgtgtatgttttattttggtttagtttggaattttttttatttagtaggattggtgagaattttttgaattttttttttttagtgatttttgtagtttgatttgggtttgtttttgtgtgtttttaggaaatagaagttgatggaaagtagtggttggtgtttgggtgggtttgtggtttgtgtagttgtggatttgaaatttttttggtgtttttttttgtttattagagttttttggagattttttttgagttttgttttttatttttttttaattttttttgtaggaaggttgtgggttagggggatgtttttgatgtgttattaggagtttgggtagtttggtgggaattagaattaggtgtgttttgagtttgtttattagtgtttttgttatgattatgattattattattgttagttattagtagttgagaaggtgtttttgttgtgtttgtgttttggagtgttagtttttgttatgaatgttgtttttttaatgtttttttttgtgtttttagtgtggttattgggtgttgtttttagaagtgatatttattggtttttgtgtagtgttggagtgtggtttttgtttttgttttgttttttttattttgtgtttagttttgttttgtgttgtgaagaaatgaaatttatagattttgtgttgagggtggttttgggtgtagaaatgaaatttagtttttggttttgtatttgtagtatttgttttgtgggaatttgtgggagatgtaggtttttgggtttgaatttaggtttgttgaattagatgtttgttttattaggtttgtttgaggattaaggtgttttggaggttttttaatggtttggagttatttaagtttgtatgtatttttgaatttaggtatgtttttttttttgttggttttgaaaatagatgtattggtaattgggggtttttagtttttttttagggtttattgggatgattttagtattagtagggatttttaggtattgtgtgttaatggttgtagagttttttttgttttgaattttgtttagtatttttatttttaattaggtatatttatattatttttttttttttttgtttttttttgtttatttttaggtttttttggagtttggtttatttggtttttttagggtggaaatgggtgtgtggaaggaaaataaaataaaataaataaaatagtaataataaagtttaaaataataaatataatataggtaatagttgttaggttaggttattgtattttaggttaggttattgtattttttgtgatttgtaggtatatatttagatggtttaaagtaattgaagatttataaaagaagtaaaaatagttttaattgatgatattttattattgtgatttgtttttgttttattttaattgattaatgtattttgtaattttttttatttttaagaaggttatttgtaattttttttatttttgagaatgtattttgtgagatttatttttgtttattagagaataattttttttgattgtaattttttattatttttttaaattttataaaatggttttatttttatttttttttgttgattttttttttggatttagtttgtttgtatttaggtg

SEQ ID NO: 223 - DNA, 3377 bp, Artificial Sequence
  chemically treated genomic DNA (Homo sapiens)
tatttgtggttttatgagtttgtattgaagttggatatttataatattttttttaatattttattattttttttttttgataattatgttttgagaatttgaagtaatagatatgaagagttttaagggattgtattaatgtatgttaagattagtttttattatatagtttaatgatatggttttaggtttagaagggatgttttatatttatagaattttattgagtttaggtgttagtttagagaatttattatttttttgtttttttttaagagttaattgatgggatagtatgtaaagtatatgtgtttttgttgttaaaatagtagttaaaattgtttgtttagatgtgtaagattttatgaaatgttttggtaaaagttagtttaggagtgttggttaaggtgttgaagtgaagtaaggggagttaggattatttttgttattgaatttttttttttttatttttttttaaagatagtgagtttatttattttgataagatattttaggattttaaatttgatataattttggagaaagtagtgtgtgtgtgtgtgtgtgtgtgtgtgtgtgtgtgtggtgtagaagggtatttgggatatataatttttatagaaattttagtgttataaaaattttaggaggatttatatttaaaaaaatatataatagtttaagttgtttattttaattgaatgttgtgtgtttttattagatttttagtgagatttagtttaatgagttaattgtaaaataaagtttttgttaagggaatggtagaaaatgataaaattataattttgaatgattatttaaaagtaaaaagtattttttattattgtgtggagatttttttatttttatttttatttgaattgaatttttttttttaatgtttttttgaatagtttgtttttggtgttttgaaaatgtgtatgttgatagtagtattatatgttgtttttggtatagagtgagttaatagttgaattatttttgggtaattgtggattgtagttagtgtaagtgtaagagaaggtattttggttattaatttgttttatattttaattatttttgtttgttttatattttttgggtatttgatgttttttttttttgttaggtaatttgtttttgttttgtttaattttttgatttttggttttagagaatagttttggttgtgggaattggttttgggaagtttttggtgttttttttattggtgattggtaagagtaatatttttatatttttaaaaagagttgtttagtttttaatgatattttttggtaaaaaagaaaatgaaatatataatttggattttggtttattaaatgtaggttaagagtgtggttgttgagttttggttttgttgtgaggttgttgtttttatttgttttttgtttttattagagttgatttgttttttgttatttttttttggtagtgtggatttattgtaatgtaggaatatttgggttggtatggataggattttagtattagatgttggttgttgttttagggattttttgtggaaattatttagtatttagaagttgttttaataaggaagtaattagtaaagtattgttggtgggagaattttgtgaaatattttagaaaaatattagaaattgttggagatttaatgatttatgttttttttagtttgtgttttttagttttttttggaggagtattaagtggtttgtgggtttttattttgtggtgggagggttgttttaagtatatttatttttgtgatagttaatgttggggggttttagttttaattagggtgaggattatggattgtattttttttttttagtgtattggtttgtttattggagggtgagagggatgtgtagatttttggatttaggggttttgttttgtagatttttttattttatttggggtttttggtatttgtattatttagtattagtgtgattggtggtgtattttggtttttttgtgttttattaaagtttttgtatatttttttttatgttgtgtttttgttatttatgtagttgtttttttgagtgttttgtgtgtataaatgtgtttttggtttttatgtgttggtggtgttgttttgttgaggtggtgttgggggagtttgtagaggtggtgggggagggagtgtggaggagaggatttgtgagttgtggggatttgggtttgttgagtttttggggaagttgggttttgttttttttgggtgtttggggtgtgtgggaaggtgtggaggatgtgttgtatttatttgttgttgttgttggttgttgattgttattgtggtggtggatgtggtgttgtgttggagtttggttgtttgtttaggttttaataggttttgggtgaatttgtgggtttgtttattggttattgttggttatgttaattgtgttgtgggtttggggtgtgttttttgttggttttttttgtgttaattttttttatttatttgttgtttaggaagtggaatttggagttttttttttttttttttttgtttaatttgtaagaggtgggttttttttttttgtatttttattttttttattttttttttttttttgaagttttttgaagattttttaaattttgtgtttttttgggtgtgtgtggttaatttggttggtggttgggttttgtagtggtgtatttggagtgggtgttgtgggatgtgtgtggggtggtttttgtttgtgttgtttatatgggtttagttggttggttggggttgtttatgttgtttgggggaattgtaggttgtgggggagggtggggggtggttgttgaggggttttgggtggggtttgtttaaggttgttgtttgtttaaggttgttagttttatttggaggttgttgggagagttggagttttggatgtatttgttgtttagatttttattttttgggtttggttagtgggtgggggttaagtttggtttgtttttttatttttgggaaggggttagaggtttattaaagatttggtggttgggattttagtagtattgtttaagttagtgtttggaaggtttttttgttagaagtttatgtttagggttttggaataagtttttttatttatttatttttttaatgagtatttattaagtgtttattatatgttagtttatattgttttggaaattgaggatatggagaggaatttagtaattatattttaaggttgtgtagagttgataggtttttttggggtaggggtgggagatagtaagtaattaagtgaataaataaataaatatagagaaattaaggagatagtttaagttattaatatgaatttaaaattaataaattagtgttttgggggtaagag

SEQ ID NO: 224 - DNA, 3377 bp, Artificial Sequence
  chemically treated genomic DNA (Homo sapiens)
tttttatttttagaatgttgatttattggttttgagtttgtgttagtagtttaaattgtttttttgatttttttgtatttgtttatttgtttgtttggttatttgttgttttttatttttattttgaaaaaatttattagttttatatagttttaaagtgtagttgttaagtttttttttgtatttttagtttttagaatagtgtgagttggtatatagtaggtgtttaataaatatttattgaaggagtgaatgaatggggaagtttattttaaggttttgaatatggatttttggtaagggagttttttaaatgttggtttgggtgatgttgttgggattttagttattagatttttaataagtttttgatttttttttgagggtggaagggtgaattgagtttggtttttatttattagttggatttagaaaatagaagtttaaatggtaaatgtatttagggttttaatttttttagtaatttttaaatgaggttgatggttttggataggtgatggttttggataggttttgtttggagttttttggtggttgttttttgtttttttttgtagtttgtagtttttttgggtggtgtggatagttttggttggttagttgagtttgtgtgggtggtgtgggtaggagttgttttatatgtgttttgtgatgtttgttttagatgtgttgttgtagggtttggttgttagttgagttggttgtgtgtgtttgggggagtgtagagtttggaaagtttttgagaagttttagaggagggaagggggtgggaagagtgggggtgtaagagagaaaaatttgttttttgtgagttgagtgaggaagaggggggggaaggttttgagttttgttttttgaatggtgggtggatagagaaggttggtgtggggaagattggtgggaggtgtgttttgggtttgtggtgtgattggtgtgattggtgatggttggtgagtggatttgtaggtttatttggagtttgttgagatttgggtaggtggttgagttttggtatagtgttgtgtttgttgttgtggtggtagttagtagttggtagtagtagtgggtgagtgtggtgtgttttttgtgtttttttgtgtgttttaggtgtttggggggaatggagtttagtttttttaaaagtttggtgggtttaggtttttgtagtttatgggtttttttttttgtatttttttttttgttgtttttgtgggtttttttggtgttattttagtgaggtagtgttattgatgtgtaaggattgggggtgtgtttgtgtatgtgggatgtttagaggagtagttgtgtgggtagtagaagtgtagtgtgggagaggatgtgtaggggttttaatggggtgtgagggggttggaatgtattgttagttatattggtgttaagtgatatgagtgttagagattttgggtggggtggggggatttatagaatagaatttttgagtttggaggtttgtgtgttttttttattttttagtaaatagattagtgtgttgagagagagggatgtagtttgtggtttttgttttggttagagttggggttttttgatgttaattattgtagaaatagatgtatttggaatagtttttttattgtagggtaaaaatttataaattatttaatatttttttagaaagggttgaggaatataggttggaggagatgtgggttattaggtttttagtggtttttgatatttttttaagatgttttgtggggtttttttattagtaatgttttattggttatttttttattgaaatggtttttaagtgttgggtgatttttgtgggaagtttttggggtagtagttagtatttgatgttaggattttatttatattaatttagatgtttttgtgttgtagtaggtttatattgttggggagaggtggtaagagataaattaattttagtggaaatgggaagtgagtgggaataatagttttatagtaagattggggtttagtagttgtgtttttggtttgtgtttggtggattggaatttgggttgtgtgttttatttttttttttgttagaaaatattattaggaattaaatggttttttttaagagtgtgaaagtgttatttttgttagttattaatgaggagggtgttaaaagttttttagagttagtttttatagttaggattattttttaaagttagaggttggaaagttgaatagaatggaagtaaattgtttggtagagggaagaggtattgggtgtttagggggtgtagagtgggtgggggtgattggagtgtgaaatgaattggtggttagggtgtttttttttgtatttatattagttgtagtttgtagttatttagaggtggtttaattgttagtttattttgtgttagggatagtatgtggtattgttattagtgtgtatatttttaggatattaaagataaattgtttaaaagaatattagaagaaaagatttaatttgagtaaaagtagagataagaaaatttttatatagtagtagaaagtattttttatttttgaatgattatttagaattgtggttttgttattttttgttatttttttgataaaaattttattttgtaattgatttattggattgaattttattgaggatttgatggaaatatatagtgtttaattggaataaatagtttaaattgttgtgtgtttttttaaatgtagatttttttagaatttttgtggtattagaatttttataaagattatgtattttagatatttttttatattatatatatatatatatatatatatatatatatgtattgttttttttaaaattatgttagatttgaaattttagggtattttgttaaaatgaataagtttgttgtttttaaaaagaggtgggggaggggagatttagtggtaaaggtggttttgattttttttgttttgttttagtattttggttaatatttttaaattagtttttgttaagatattttatgggattttatatatttaggtaggtagttttggttgttattttggtagtaagaatgtatgtgttttgtatattattttattagttaatttttgaagggaaataggaaggtgatgagttttttgagttggtatttgaatttggtgggattttgtgggtgtagagtattttttttgaatttaaaattgtgttattggattatgtggtagagattaattttagtgtatattgatgtaattttttaagattttttatatttgttgttttaagtttttaaaatatggttgttaagggagaaaaatgataggatgttggggaaaatattatggatatttgattttagtatagatttatagaattgtgggtg

SEQ ID NO: 225 - DNA, 3043 bp, Artificial Sequence
  chemically treated genomic DNA (Homo sapiens)
aaaatttaaatttataatttgaggtatttgggaagttgtttttttagggtggaatggttatggaaattgggtaggttgggggtttttttggggaatgagggagtggaggagttttttgttttttttgttagattagaaagagaaatgttttaagaatttgggtttttattttttaggtgttttttttggaggttttttagggattgtttatagtgtttttttttagttttttttttttttttatttttttttttatttgttttgttttgtgtttgttttgttttttggtttgtggggttttaaggatggttggttgtttttgttatagttatttggttgtttagagtggtggggtgtatggggttgagagagttagttttagggtttggggttgggaattgaagtttggtgtgaaggaagtgggagtttgggttgaggaggtgaaggggaaaggaaaagtgaggggaatttgagtgggagggttttgagaggagtgggaggttgtgggaaggggaggtttggtatttttgggggttatgggggttggggtgtggtttttggtttgggagggtgtgggttttttttggtagtgttgtttgttggtttagttatgtgtgttgtgtgttgtgaggttggtgggggttttgttgggtttgggggtgtttttgggggttgtttgtgtttagttatggtagggtgttttttggtgaaatggggtttgaggtgggttttgattttgtgttggtgttgtggattgtttgggagttgtagttgtgggtgtttggtgtttggtttgtaggtagtgttattagttgattgtattgtggtggttataattattaattttattgttattaaaataaggtatagtattattgttgtttggttgggaagaagatgttggtttgggtagtttgtagtttttgagagaagatgtttgagaagtgtggtgttggtgtgggttttgtgtagtttgttttgtgagtgtttgttgtaagtgtgaggaaatttgtggtttttttagatatagttaaattgttagttttttttaggagttatagaagatgaaatagttttatgttaggaaagtaaaatttttggaggtgaagtttttttatttatgtaatggttaatattgtatgttgtgatttattgtgtttatttgttattgtttagtagagtatttattaagttagtaatttagttgagttttaatttaattaatgaattgtttgtttgttataatgtgttggggtattaatttgagattgtaattttttttatgagtttagttattaggtagtgtagttagttgattgttaatagtattaattattaattatatggttaggtaaaaagatttgggaatttgtttaaatgagttgtttgtgtattattaatgtgtgtggggaagaggggtgttggaaaatgttgattttatttattgtttattaattgtttagttaaaagaaaaaaattaatattttagttattaagtttataatgtatgtaatgtgtatgtatgtggggttttgttttgttttttttttaatatttttttaggtttttaattaaaattttagatataagggggaatatgattttttttttagttgattgatgtatgttattatatgaatatgtgattattaattttttgagattatattgttagtaatattttgaaagtaatattgttagtaatattttgaaagaataaagtgttataaagatataaattgtggttattgttatgtgtttattttttttgttaaattgattttatgatgtttattttagtttttgttatagtaattttaatttttttattaatgaagtggttaagttgtttttgttatgataaaaattttttgggaaagttatttatatatatagatttgttaatatttttataagaaatatattaataaaattttttatattttttttttttatgaagagattttgtttatttattaagatgtatttttttttttaagtaattatttataattgttggagtttatgtaatttttagtgggagtgattagtaaatgtatttatattttaaatttagtttgttttttaagatttaaaggatttagaattttaaaattatagaaattgtatatatgggtatgtatttgtttagtttaggtttttagtttttaagggttaggtttttaggtgtgaattttttagtgtaatgtttttagaatttttatttagtaggtgttgtttttggtaatttggtttggaagtggggattggggtaatggggttgaggaatttaaagtttatttagttatttttttggggggaggggagaggatgtggtagtttattgaggatataagaagttaaattatttttttattgattttgataggatataatttaaagttgatgttttgatttttttatatttaagatttggattggttttaaaatttgattattgtaggggtgggtttttgatggtttttatgtgtgtggtggattttaatatttatttaggaaattgagggtagttggtaggggttggtattaatttggtggtttttggaggggtggggtaggggtggggtggggggaggggagaggatgtttgtagaagtgtttttagttgttatggaaatgggatttagtgaagaatttagtggttgaaaagagttttaggaaatgtgttttttgggattattggtatttgttggttttttggaataagatgttaatttggttaagtagttttggattttggtgttgatgtatttttttagtgaattttagttggtgttgtgtagagatagtagttagtgtttgttggtggtgtggtttaggaggagtagagggtttggtgagtagaatagtggttttttgttagttatatttgttttattgtaattggtttgtaggtattagagttttttttaggagaaattgtaatggtatatataaatagttataagtatatataaatgtatgtataaatattttttgaatttttttagtaatttttttatttgaaaaggattagtggtat

SEQ ID NO: 226 - DNA, 3043 bp, Artificial Sequence
  chemically treated genomic DNA (Homo sapiens)
atattattgattttttttgggtggaagggttgttggaagggtttaggaaatatttatatatgtatttgtatgtatttataattatttgtatatattattgtagttttttttggaaagggttttggtatttgtaggttagttatggtgaggtagatatgattgataggaggttgttattttatttattagattttttgttttttttgggttgtgttattggtagatgttgattgttgtttttgtgtagtattagttgagatttgttagggggatatattgatgttgagatttagaattgtttagttaagttggtattttgttttgaggagttagtaaatattagtaattttggggggtatattttttgggattttttttggttgttaggttttttgttgggttttgtttttatggtaattgaggatgtttttgtaagtgtttttttttttttttttgttttgtttttgttttgtttttttgagaattgttaagttggtattagtttttgttggttgtttttggttttttaggtaggtgttgggatttgttatgtgtgtgggggttgttggaagtttatttttgtggtgattaggttttaggattagtttaaattttggatatgggagagttaaaatgttaattttgggttgtgttttgttggagttagtgggggagtagtttagttttttatatttttagtgggttgttatatttttttttttttttttagaaagatagttaaataaattttaaattttttagttttattgttttaatttttatttttaaattagattgttagggatagtatttgttaggtggaagttttgagaatgttgtgttggagaatttatgtttgaaagtttagtttttgggagttagaggtttgaattgggtggatatgtgtttatgtgtatagtttttgtgattttaaaattttgaattttttaaattttaggaaataagttggatttaaagtgtaagtgtatttattaattatttttattaaaagttgtatagattttaatagttgtaaatgattatttaaaagaagggatatattttaatgagtgaatagagtttttttatggaaaaaagaagtatgaaaaattttgttaatgtattttttataaaagtattaataagtttgtgtgtatgagtagtttttttgggagatttttgttatggtaggaataatttaattattttattgatagaaaagttaagattattgtggtaggaattgagatggatattataaagttaatttagtaaaggaaatggatatatagtaataattataatttatgtttttatggtattttatttttttgaaatattattaataatattatttttaaaatattattaataatatagttttaagaagttaataattatatgtttatataataatatatattagttagttaagaaaaaaattatatttttttttatatttaaaattttggttaagagtttgaaggaatattgaaaaaaaaataaaataaaattttatatatatatatattatatatattgtaaatttagtagttgaaatgttgattttttttttttggttgagtaattaataggtaatggatgaaattagtattttttaatattttttttttttatgtatattgatgatgtataggtagtttatttggatgaatttttaaatttttttatttggttgtgtggttagtgattggtattattagtaattagttaattatattgtttagtaattagatttatagaaaaaattgtagttttaagttggtattttaatatgttgtgataggtaggtaatttattggttgagttggagtttaattgagttgttagtttggtgaatattttattagatgatggtaaatagatatagtgaattatagtatatagtattaattgttatatggatggaggggttttatttttagggattttgtttttttggtatgagattgttttattttttgtgatttttagagagagttaatagtttaattgtatttggagaaattgtgggtttttttgtatttgtagtgggtgtttgtggggtaggttgtgtaggatttatgttgatgttgtgttttttaggtatttttttttgaaggttgtgggttgtttgagttggtgttttttttttggttgggtggtggtgatgttgtgttttgttttgatggtagtggagttagtgattgtaattattatagtataattagttaatgatattgtttataaattgagtattgggtatttgtggttgtagtttttggatggtttgtagtgttgatgtggggttggggtttgttttggattttattttattgggggatgttttattatggttgggtgtaagtggtttttgaggatatttttgggtttagtgggatttttgttggttttgtagtgtataatatgtgtagttgggttagtgggtggtgttgttggggaggatttgtgtttttttaggttgggagttgtgttttgatttttatgatttttaggagtgttaggttttttttttttgtagttttttgttttttttagggtttttttgtttaggttttttttgtttttttttttttttttgtttttttggtttgggtttttattttttttatgttaggttttagtttttagttttaaattttagagttggtttttttgattttgtgtgttttgttgttttgagtggttgagtgattgtggtgggggtgattaattgtttttggaattttgtgggttgaggggtggggtgggtgtgagatggggtgggtgggggaggggatggggggggggaggaggttgagagaaagtgttgtgggtggtttttgaagggtttttaagggagatgtttagaagatggaggtttagatttttgagatgtttttttttttgatttagtaggagggataaagagtttttttatttttttattttttaagaaggtttttagtttatttagtttttgtgattattttgttttgggaaagtggttttttaggtattttaaattataggtttgaatttt

SEQ ID NO: 227 - DNA, 4908 bp, Artificial Sequence
  chemically treated genomic DNA (Homo sapiens)
ttagaggttatgttggttatttttttttgtttgtaatgttttagatatatatgttttgtaatttagaaatttgtggttaagaaaggtgttaagatttgtagaaaagttgggatataggaaagagaaatgaaggttgataatagattttatgggggtgagggagattaggttaattagagaagatagtatatgttagttttagatgtagaataattggatttggatttaataagttgagtataagtggagatgtaattagaaaagattgaagtgaaatttttaagtaaaaaaaaaaaaaaaaaaaaaaaaaggatggagtagtagttagaggggatgttatttttataaaagataaataaattgatggaatggaattttgtagggagagagaggattagtagagagagggaggtgtaggaaaatgaggagtggggtataaaggtggggtttttagggagaagaggagttgattttagagggggagaagaaaaggatatagagttggttgtatagagaaaaggggttaaggtagagaagatggtgggatggtgtgagatggagtttatagaaatatttagagaaggtgatgattatatagaggagtttttagaggggtgaatttttgaggaagatgaatgtggagggtggagttagttagaaatttagaaaaattagaggtgtttttggtagtgaaggaagttgggaaggggttaggttattagggtatgaagtatgggagaaaatgggtttgaagagggagagtgtttgagagaaaaggaaaattagagattaggaaaattataattgatataaagataagaagagatataaggaaaggggtgtaatttgaggaaggagggtttggtaagtaatttggtaattatagtgttgggagagaatgtataaaagaagggtagtttaggagttgtggggtattggaagagatataatagaaaatgtaggtttttatttagtaaaaataagttatgtgtgaagttgaggtataaggtaagggaaggttagaaatgaggtaatttgtgtatagattgggtttggttaatgttttaggggtggggttaggtgggttgtttttggggggtggggttagttttggtttaataaggggtatttgatgttttattggttatttgttttgaaagggggaagatagtttgggtgggtaggatgtgtggagggagaggtagtggtggtgtgaggtttaatttgaagtgttattggtgggattgatagttttgtgtgttaagaagttggtagaagggaaggggtgggatattagtttaggattttaaattgtattggttgtttgttttggttgagagaggtgatgtttgaagtttattggtttttgtgagatagggtaagaaaagtagtgtgagtttggtggtttttttggttatttttttatagtgtttttgggtgtttttttgattgaatttgattttattggaggttgtggtaattgtgaattagttgtatgaatatggttttttttgtttttttgttttttttttttttagttggattttttaatttaggtattttttttttttttttttgtgttttttttgtttttgtgttttttttttttttttttgttttgtgggttttttggtgtgtttttggttttttatttgttttttggggtatgggaaggggggagggggatatgtatgaaattaattgttggtagtggttataggagtaggaagtgttggatatagtgattttatatgtttatataaaaatttgaataaggtgtgagtgtaagagagatattagtgttttaaggagaaggtttttggtttagattagggtttagtatatgataggggtttagtaattatttgtggaatgaatgaaggagtgaaggaaaataatttgaaagtggggtaggtggtgggtgtggtggtttatgtttgtaattttaatattttgggaggttgaagtaggtaggttgtttgaggtaggttaggagtttaagattagtttggttaatatggtgaaattttatttttattaaaaatataaaaattagatgggtgtggtggtataggtttgtaattttaggtatttgggaggttgaggtaggagaattgtttgaatttaggaggtggaggttgtagtgagttgggattgtattattgtattatagtttgggttatagagtgagattttattttaaaataaaaaaaaagaaagaaagaaagtgggataggggagttaagtatagtggttttagtttgtagttttagttattggggaggttgtggtaggaggattgtttgagtttaggaggtggaggttgtagtgagttatgattatgttattgtgttttagtttgggtgatagagtgagattttgttaataaaaaaaaaaaagaaagtggagtagggaatttatgagaataaggtaattattgggggtgtaagagagggttttgatttaaaggggtataagaataaaataagattaaaggaatgtaaggaggtagttgttttgtagggtatagatgagattaagaattgaaattgaattaagaattgaaaggggtataaaattattggtaggtattggatgaatgtatgagagtggggtgagtattgttgaagaggatgttaggaaatattgttgggatggaatagggtgtttgtgaaaaggggatgtaggatttgttgaaggggtatgtgaggatatgagtaggttggaatttaggatgtgtgtgtgggtgggaaagtgtttggattgaaagaaaagaatgtttgaattgaaagaatatagaatgttgggtgtagtagtttatgtttttgattttagtattgtgggaggttaaggtaggaggattgtttgagtttaggagtttgagattagattagtttgggaaatataatgagattttgtttttataaaaataaaaataaataattaaaaaaaaattttttttttgagatagagttttgttttgttatttaggttaaagtgtagtggtgtgattatggtttattgttagttttgttttttgggtttatgttatttttttgttttagtttttggagtagttgggattataggtgtttgttattatgtttagttaattttttgtatttttagtagagatagggttttattgtgttagttaggatggttttgattttttgattttgtgatttatttgttttggttttttaaagtgttgggattataggtttgagttattgtatttggtttaaaaatttttaaatttaaaaaaaggggggatgggtgtagtggtttatggttgtaattttagtattttgggaggttgagataggtagattatttgaggttaggagtttgagattagtttggttaatatggtgaaatattatttttattaaatatataaaaataaaaaaaaatagttgggtatggtggtttttgtttgtaattttagttatttaggaggttgaggtaggagaattgtttgaatttgggaggtggaggttgtagtaagttaagattgtgttattgtattttagtttgggagatagagtgagattttattttaaaaaaaaaaaaaaaaaaaaagaaagaatatagaagaggaagaggagaggggtttttgaagaaggaagatatttgagaaatgttatggggtaaagaggggagaaagttgggaaagaagttagaattagggtggggtttaaagaggggtaggatggagatttgtaggtgtggtttttagggtaggagggttgttaggggtaggtttatttggttatgtttattttttatttttgtttttagatttatggaatttagtgatatgtttgttggttattattgttttttagattttgttttttgggatgagattagagatttttagagtatagagttgatttttaggagagttattagttgttttttaatttgtgtttgttgttgtaattatggtgttattgtttattttaagggttataagtgtttttgttttttttaggtttgtgagtgttataaatgtgtttttattttgtgagtatgaggtttgggaggggaggaggatgagttttttttaaagggtggttgatttttgatttgtaattttttatttttagggagtgttgtagggttatggttgtttaggtggttttgtgtaggtagtaggaggtgtagttaaagaagtatttgatgaggagaggggaagttttttttaaagtttttaattattttagaaagggaattatttagttataggttttttgtgagtgtttttgattagtgatggggtaggagtttgggtataggaggtaggtatgggaaaaagaggtttagttttgttgttgaattggtgtatgattttgaattaagggtttttatttttttggttttagttgttttagtgttgagagaatgtagtgagttttgtgggttaaaaatgggttagaggttgggtatagtggtttatgtttgtaatttgagtattttgggaggttgaggtaggtagattatgaggttaagagattgagattattttggttaatatggtgaaattttgtttttattaaaaatataaaaattagttgggtttggtggtgtatgtttgtagttttagttatttgggaagttgaggtaggagaattatttgaatttaggaggtggaggttgtagtgagttaagattatgttattgtattttagtttgggtgatatagtaagattttattttaaaaaaaaaaaatgagttagatgggggagatgagaattgtttggggttggggtaggataggggttaggagaaagggtttattagagttttttttggttttttatagttggaaaggagaatatagtattttagttttagattttttatggggtagttttgttggtattgatattttttgggaag

SEQ ID NO: 228 - DNA, 4908 bp, Artificial Sequence
  chemically treated genomic DNA (Homo sapiens)
ttttttggggggtgttggtgttagtaggattgttttatggggggtttgaggttggggtgttatgtttttttttttagttgtgaaggattagggagagttttaatgagtttttttttttgatttttattttattttaattttagatagtttttattttttttatttagtttattttttttttttgagatggagttttgttgtgttgtttaggttggagtgtagtggtgtgattttggtttattataatttttgttttttgggtttaagtgatttttttgttttagttttttgagtagttgggattataggtatgtgttattaagtttagttaatttttgtatttttagtagagatggggttttattatgttggttaggatggttttgattttttgattttgtggtttgtttgttttagttttttaaagtgtttggattataggtgtgagttattgtgtttggtttttagtttatttttgatttatagaatttgttgtatttttttaatgttgggatagttgaggttgagggagtagaaatttttagtttaaggttgtatattaatttagtagtaggattgggttttttttttttatatttgttttttgtatttaaatttttgttttattgttggttagagatatttataggggatttgtggttgagtggttttttttttgaagtggttgggagttttgggagaggttttttttttttttattaggtgtttttttagttgtgttttttgttgtttatgtaaggttatttgggtagttatgattttgtggtgttttttaaaagtggggagttgtaagttaaaggttagttattttttggaggaggtttatttttttttttttttagattttatatttataggatgaggatatatttgtgatatttgtaagtttggaagaggtagaggtgtttgtggtttttgagatgggtggtgatattatggttgtggtagtgggtgtaggttggagagtggttgatggtttttttggggattagttttgtgttttgggggtttttggttttattttagggggtagagtttaaggggtagtggtagttagtaggtatgttattgggttttatggatttaggggtaggagtggaaggtaagtatagttaggtgggtttgtttttaataatttttttgttttggagattatatttgtaggtttttattttgtttttttttagattttgttttgattttggttttttttttagtttttttttttttttattttatgatattttttaggtattttttttttttagaaatttttttttttttttttttttgtgttttttttttttttttttttttttttttgagatggagttttattttgttttttaggttggagtgtagtggtatgattttggtttgttgtaatttttattttttgggtttaagtgatttttttgttttagttttttgagtagttgggattataggtaagagttattatgtttggttatttttttttatttttgtatgtttagtagagatggtgttttattatgttggttaggttggttttgaatttttggttttaagtgatttgtttgttttggttttttaaagtgttggaattatagttatgagttattgtatttgttttttttttttttaaatttaaaaatttttaggttgggtgtggtggtttaagtttataattttagtattttgggaggttaaggtgggtggattataaggttaggagattgagattattttggttaatatagtgaaattttgtttttattaaaaatataaaaaattagttgggtgtggtggtgggtgtttgtagttttagttattttagaggttgaggtaggagaatggtgtgaatttgggaggtagagttggtagtgagttatgattgtgttattgtattttagtttgggtgatggagtaagattttgttttaaaaaaaaaatttttttttaattgtttatttttatttttatagagataaggttttattatgttttttaggttggtttggttttgaatttttgggtttaagtgatttttttgttttggttttttatagtgttaggattagaggtatgagttgttgtgtttgatattttgtatttttttaatttaaatattttttttttttaatttaaatatttttttatttatatatatattttaggttttaatttatttatgtttttatatatttttttagtgagttttatattttttttttataagtattttgttttgttttaatagtgttttttggtattttttttaataatgtttattttatttttatgtatttatttaatgtttattagtagttttatgttttttttaatttttagtttaattttaatttttagttttatttatgttttgtaaagtaattgtttttttgtatttttttagttttattttgtttttgtatttttttaaattagaatttttttttgtatttttaataattattttatttttatggattttttgttttatttttttttttttttttattgatagggttttgttttgttgtttaggttggagtgtagtggtgtgattatggtttattgtagtttttattttttgagtttaagtaatttttttgttgtagtttttttagtagttgggattataggttggagttattatgtttggtttttttgttttattttttttttttttttttttttgttttgagatggagttttattttgtagtttaggttgtagtgtagtagtgtaattttggtttattgtaatttttgttttttgggtttaagtaatttttttgttttagttttttgagtatttgggattataggtttgtgttattatgtttgtttaatttttgtatttttagtagagatggggttttattatgttggttaggttggttttgaatttttgatttgttttaagtgatttgtttgttttggttttttaaagtgttgggattataggtatgagttattgtatttgttatttgttttatttttaagttatttttttttatttttttatttattttataaatggttattgagtttttgttatgtgttaggttttgatttgggttaaaaattttttttttggggtattaatgttttttttgtgtttatattttatttaggtttttgtgtaaatatgtgaagttattgtgtttagtgttttttgtttttgtggttattattaataattaattttatgtatgttttttttttttttttttgtgttttagggagtgagtggggaattgggaatgtgttaaggggtttgtgaggtagggaaggggagagggggtgtgagggtgggaggggtgtgagggggaggagaggggatgtttgggttagggagtttggttaagagggaggaggatggaaaggtaggagggattgtgtttgtgtagttagtttatggttattatagtttttaatggagttagatttagttaagaagatgtttaaagatattgtgagaaagtggttagaggaattgttaagtttgtgttgttttttttattttgttttataaagattaatgaattttaagtattgttttttttagttgaggtagatgattaatgtggtttgagattttgaattgatgttttgtttttttttttttgttagttttttggtgtataagattattagttttattaatagtgttttgagttgagttttgtgttattgttgtttttttttttgtatgttttgtttgtttagattgtttttttttttttgaggtaggtggttaatggggtgttgagtattttttattggattgaggttggttttgttttttaggaatggtttgtttggttttgtttttggggtgttgattaagtttggtttgtgtatgggttgttttgtttttggtttttttttgttttgtattttgattttgtgtgtggtttgtttttgttgagtggaggtttgtgttttttgttatgttttttttggtgttttataatttttgagttattttttttttatgtgtttttttttagtgttgtgattattgggttgtttattgggttttttttttttagattgtatttttttttttgtgtttttttttgtttttgtgttggttgtgatttttttaatttttgatttttttttttttttggatgttttttttttttggatttatttttttttgtgttttatgttttgatagtttggtttttttttggttttttttgttattggggatgtttttagtttttttgaatttttggttggttttattttttgtgtttattttttttaagagtttgtttttttgggggtttttttgtgtaattgttgttttttttgggtatttttgtgaattttgttttatattattttgttattttttttgttttggttttttttttttgtatagttagttttgtgttttttttttttttttttttaaaattgattttttttttttttgagagttttatttttgtgttttattttttatttttttatgtttttttttttttgttggttttttttttttttgtaaggttttattttattaatttgtttgttttttgtaggggtggtattttttttgattattgttttattttttttttttttttttttttttttttgtttgaggattttattttaattttttttggttgtgtttttatttgtatttagtttgttaggtttaggtttagttgttttgtatttgaggttggtgtgtgttgttttttttgattggtttaattttttttatttttgtgagatttgttgttagtttttgttttttttttttgtgttttagtttttttgtgggttttggtattttttttggttatagatttttgggttatagagtatgtgtgtttgaggtattgtaggtagaaaagggtggttgatgtgatttttag

SEQ ID NO: 229 - DNA, 7563 bp, Artificial Sequence
  chemically treated genomic DNA (Homo sapiens)
gttatggtgtttggttaatattaaattttaagttttaaaaataattttttttggttttatgttttatttttagatatattgatgtggtgaatttgtttttatagttttgggtggttttgtttttagggtagtttgatatttggtttgtattttggttttttggggttagagttatatattggttgttttattgttttgggttaagggagttgatttattttagttttgttgagtgttgggttttatagggattttttgtggtgttttatatttttggaggtttttgtattttgtgtttttataagggtattaattttttttatgaaggttttgtttttagaatttagttattttttaaaggtttatatttaaatattattaattgaagattagtttttaatatgtaattttttggggagataaaaatatttagattataataattttaatattatttataattatatttaatatattatgaatttaatattttaaagatattgttagattggattaaaataaatgttttaatgtttatatgggatttatattaaatataaagatatagaaagatttaaagtaaaaagattttttaaaaaaagttgttttatgataatattaatggaaaaatagttaatgtagttgtaatgatattaaataaaagtggttatatatagtaagtaggaaatggttgggtgtggtggtttatgttggtaattttagtattttgggaggttgaggagggtggattatgaggttaggagattgagattattttggttaatatggtgaaattttatttttaataaaaaatagaaaaaattagttaggtgtggtggtaggtgtttgtagttttagttatttaggaggttgaggtaggagaatggtgtgaatttgggaggtggggtttgtagtgagttaagattgttttattgtattttagtttgggtgatagagtgagattttgttttaaaaaaaaaaaaaataaaaaaagagaaaaaagaaatagaaatttagttaaagatgttataatgataaaaggtaatatatatagataatattataattatatgtgatatattttatattataatgttaaatgtatgattatttgataaaattaaataatatgatgataaaattattataattaggttattaagatgaaagggtaaattttataggaaaatatagtgattttaaatttgtgtatttttaataaaatagtattaaattatgtagtgaaaattggttagttatggtggtttgtgtttgtaattttagtattttgggaggttaaggtaggtggattgtttgaggttagaagtttgagattagtttggttaatatggtgaaattttatttttataaaaaatataaaaaaaaagaaaattagttgggtgtggtggtgtgtttttgtagttttagttatttgggaggttgaggtaggagaattatttgaatttgggaggtataggtttttattattatattttagtttgggtaatagagtgagtgagattttattttaaaaaaaaaaaaaagtaaaattatgtagtataagttgatagtatataatgaaagtgtaagtagagaaatttatatttattaattgaaattttttttttttgtttttttagtaattaatgagatagttagataaaaatattagtagaagttaggtatggtggtttatatatgtaattttagtattttaggaggttgaggttggtggtttgtttgagtttaggaatttaagattagtttgggtaatatggtgagattttgtttttatgaaaaatataaaaaattagtttggtgtggtgatgtgtatttgtaattttagttattaggggtgttgagaggggatgattatttgtgtttaggaggttgaggttgtagtgagttgtaattgtattattgtattttagtttgggtgataaagtaagatttagttttaaaaaaaaagaaaaaaaattaatagagaaatttgaataatatagtaagtttgattagttgatatatgtagagttttgtatttaataagtgtaaaataattttttaagtatatatgaaataattagaaaataattatatattggggagtaagttttaaaaaatatttatgaattgaagttatattgagtatgtttttagtttatagtgtaatttaattggaagttaataataaaaaggttagaaaatttttaaatggttgaagatgattaattatatatatatatgtgtatatatatatataaatatatatggatatatgtgtatatatatgtgtatatatatgtatatatatatgtgtatatgtgtatataaatatttatatgtgtatatatatgtgtataaattatatatatgtgtatatatatatatatatatatatgtgtgtatatatgtgtgtatatatatatgtgtgtatgtgtatatatatgtgtgtatatgtgtgtgtatatatatataagtgtgtatatatgtgtgtatatatattgtgtatgtgtgtgtatatatatgtgtatatgtgtttgtatatatatgtgtgtatatgtgtgtgtatatatgtgtgtgtatatatgtgtgtgtatatatatgtgtgtgtatatatgtgtatgtatatatgtatgtgtatatagttgattatttttaattgtttggagattttttattatatatattttttttttaatattatatggtgttttattatatagtgttttttatggatatagtttaagaattatttgttattttgttttatagaaagtgtgaaattgtaggggagttgatttgtatagattttggtaaaaagataattgagtaggtaaattttagggagtttttggatagtggatttttttgttagtggttttggagtttttagttttagttatttgtggttaattgtggtttaaaaatattaaatagaaaattttaggaataaatagtttttaggtttttaattgtgttgatttttgattggtgtgatgagatttagttattttatttttttttatagaaagtgagttttttttttgtttagtgtttttttgttgtttataatatttatttgttagttattttataatttgggttattagatgattgtggtaatgattagtgtggtgtttttaagttgttttgattttattgattttttgtttttatttttttttggttttaaagtgtaagagaagtgatgttggtaatttagatatgttaaagagaagttgtaaatgttttttttaagttaaaaggtaaaaattttggatttaataaggaaagaaaaaaaattatatgtagaggttgttaagatttattaaaaataaatttatttatgaaaatgtgaagaagaaaaaagaaatgtatgttagttttgttgttgtattatttttggatggaagaatagaaatatgtttttattgattgtaatgggtattatttatggttttaggtatttattggggtttttggaatttattttttataggtatgggggggttattgtatttttggttttatagttttttattgttgattttaggtttttttggattttaggtttttttttttaagatgtattttagaggattaaaaatatattttatttgggttttgtttgtttttgtggaagggtagtttattagaggatataattttgtgttttaatttgtttttttttttaaaggaaatgtggagaaaaaaaaaaagtagaaattggaaataattaatatttagtttattttatttgatttttaggggaattggtgaggagtttaagatgattttttttttttagagaaagaatttaaagtttagggaaatagtgataggggagtttaagattgtttttgttagtttttttttggttattttttgttgtgattgtaggatagtttttattagtaggagaattgggtaagtgtgtggataagtagagagtgtgttgaataatttgtaatgttttatgaaatatgtattgttatggttttttaaaaggttttgtggaagttgtttgtttttattaattaagtttttatttatataaaagtagaagtagaagtagttttagaaaatatattaataattttttatttttttgaagattagagtagtagaaaataggtgatttgtattataaaattgtatttatttttttttttttttagattttatattatattagtttatttgtgttatggtgtataaaaaatggaataggtgtttttattatattgtttttttttaaaaatagattatttatattttaattttgttttttttaaatttgatttttaataggagagttttttattattttagatggagtgaggttgtatgattgggatggaagaaaggaattttttaaatttgggggaatttttgttttttgttttaagattattttatttggggtgtgggggtgggtgtggtggttagggtagtggaatgtagttgtggttgtgttatttttgtatttttaggtgtgtgggagggattggtggggatgtgagttgtggattttggtgaatttgggggaggtagatagggggaggtggatatttagttggtaggtgttttagtttttttgtagttggtgggttttttttttgatagttttaggaaaggtagattttttttttagttagttaggtaaggtaaagattgttgttgagtttgttgttattgagggtgtatagattttggggagattgaagtttgttattgtgggattttgtggggtaatttgggtttatggaagttttttgaaagaggggagaagggtttgtattttttttatggaggatttttttttttttagtattttgtttgatgtatttaattggtagaagtgagattttaataggtagtagagagtgtttatgtggaggaggtttggggtgttgtggtgttatttttatttttttttgggattgtgtttatttttaaagttatatgttgatgaattaatttatgttttaaatttttttttttagttttgtgagtttgtggtgatattgggttgtggggtggttgggaatggtttttttttttggaaaaattagagaatggtttggagagttgaaatgagtgtttgtgagtaggtttgtgtagaattgggttttaggattgttgagttttgtagggtgtttttgggggatgttaggttgttggtttttttgtttttgttgagatggataatgttttgtttttggagttttggtttgttaatgtattgggtttggatttggtgttgagttgttttaatgtgttgattttggtgttgttgttggtgttgttggtggtggttgtattagttgtttatgtggtgatttgtgttgtgggtttggtgggtaattttgttgtgttgtatgtgttgttgtgggtgttttgtatgaagattgttattaatttgtttatttttaatttggttattgttgatgagttttttatgttggtgttgtttattaatattgttgattttttgttgtggtagtggttttttggggagtttatgtgtaagtttattgtggttattgattagtataatattttttttagtttttatttttttattgttatgagtgttgattgttatttggtggtgttggttattgtggagttgtgttgggtggttggttgtatttatagtgttgtgtgtgtggtgagtttggttgtgtgggggattgttatatttgttgtgttgttttttgtagtttttgtttggttagatgatgagtagggttggtgttagtgtgtgttagtttttttgtagtttgaggttttttggtggtgtgtgagttgtttttatatgtttgtgttgggttttgttatttttgtgtttattatttgtgttttttatattattttgttgtgttggttgtatgttatgtggttggatagttatgttaaggttttggagtgtgttaagaagtgggtgatttttttggtggtggtaattttggtggtgtgttttttttgttggatgttttattatttgagtattgtggtggtgtttattattgattttttgtagatgttgttggttattgttattttttattttattattagtttgagttatgttaatagttgttttaatttttttttttatgtttttttggatgttagtttttgtaggaatttttgttagttgataatttgttgtgtggtagtttgatttttttagtgtttggttttgtaattgtttgttatttttggttagtgagggaggagttggtgttagagtgtgggattagataggttgtttaggttttttggggaaattgatttgtgttttatatttgatttagtagattggaagtgttgtgattgtgtttgtaggttgattttgttaagttttttaggtgatgtgtggttatgttgggtgaggagaattgaggttgagattgttatattgagggttttttaaagttgaggtggaggaagaggagggtagaggaggagggtggtattgttgggaattgttttttttttgttttgttttttgttgttttatttgagttttggtagtttggaatttggttggagttggaattttttgtgtttttgaagggaggtttgaggatgttgttggtgtttttaggtgttggttttgtgtggtttttgttgtagttggtgtatagttttggtgggtttttttgttttttgtgtgttttgggaagatggttaggtgtgtgtgtttggtgtttatttttgtgagatttgtttggtttggtgttgtgggtggggattgttgttgaggttgttagtgtttttttaattggggaaaatataataatttgggatgttttattggagtgtgtatatatttgtgtgtgtgtgtgtgtggtgtgtgtgtgtttgtggaggtatgaaatgtggggaaagaggttggtgtttggtagtgattgtttagaatatgatatgaatagtgatttttttttttgtttgtttttattttttttttttgtttttttttttttttatttgtgattttttttgaaaatgttagatttttggagtaaggaatttggagtagtttgggtgtgtggttttggtgttttttggaggagttagtggttgagtgtttagtgttggaggattgtggggttttgtggtggagtattttggttgagtgtgttttatagtgttgtggtatattggttattgttgtttatagaggatgttaagttttatttttatttttttaattggttttgttttttgttttatttagattagtttgttgtaattgtttatgtgtgtattgttttttaggattgaaaattttataaataatgtatatgttttaattttatgagttgttatgaagattaaataagataaaaagaaatgtgatttatttttttgtgtttttttttttttttgtttttttggttttgttttagggagagtaggaagtagggatgattgatggttttaggttttttttgttgtattttttatagggagttgtggattatttgggttttattttttatttgtagatggtatttggtaggtagttttggtaaattgggtaaatattgg

SEQ ID NO: 230 - DNA, 7563 bp, Artificial Sequence
  chemically treated genomic DNA (Homo sapiens)
ttagtatttatttggtttattgggattatttattggatgttgtttataagtaaggaataaagtttaggtaatttatagttttttgtgaaaagtatagtagagaaaatttgaagttgttggttatttttgttttttgttttttttaaggtggagttaaggaagtagaggagaaagggaatataagagaatagattgtatttttttttattttatttgatttttatggtaatttgtgagattaggatatgtatattatttataaagtttttagttttgaaaaatagtatatatatgaatagttataataaattgatttaagtaagataagagatgaggttaattgggggaatgggggtggggtttggtattttttataagtaatgatgattagtgtgttatagtgttgtgaagtgtgtttagttggagtgttttattataaagttttgtgattttttgatgttaagtatttggttgttggtttttttagggggtgttggaattgtgtgtttgggttattttgggttttttgttttgggagtttgatatttttaggggagattatggataggaaagggaaaaggtaaagaaaaggagtaggggtagatagaaagaaggattattatttgtattatattttaggtagttattgttaagtgttagtttttttttttgtattttatgtttttgtaaatgtgtgtatattatatatatatatatataggtgtatatatattttgatggggtattttgagttgttgtgttttttttagttgaagaggtgttggtggttttggtagtggtttttgtttgtggtgttaggttaagtgggttttataggggtgggtgttaaatgtgtgtgtttgattgtttttttagagtgtgtggaggataaggggatttgttggggttgtgtgttagttatagtaggggttgtgtggagttgatgtttgggggtgttggtagtgtttttgggtttttttttgaaggtgtggagagttttgattttagttaggttttagattgttagggtttgggtggggtagtagggagtagggtagggagggggtggtttttagtaatattgttttttttttttatttttttttttttttattttggttttagggagtttttagtgtggtgattttagttttagttttttttatttggtatggttgtgtattatttggagggtttggtaaggttaatttgtgggtatagttgtagtgtttttgatttgttaggttgggtatggggtgtgagttggtttttttaggaggtttaggtggtttgtttggttttgtattttggtgttggttttttttttgttggttaggagtggtgggtagttgtggagttggatgttgggggagttaggttgttgtgtggtaagttattagttggtggaggtttttgtggaagttggtgtttaggaaggtgtagaggaaggggttgaggtagttgttggtgtagtttaggttggtgatgaagtaggagatagtgatgattagtggtgtttgtgggaggttggtggtgagtgttattatggtgtttaggtggtagggtgtttagtagaggaggtatattgttaggattgttattattaggaaggttatttgttttttggtgtgttttagggttttggtgtggttgtttagttgtatggtatgtagttggtatagtagggtggtatagaggatatagatggtggatatggggatggtgaagtttagtatgagtgtgtagaggtggtttgtgtgttattagaaggttttgggttgtggaaagattagtatgtattggtgttggttttgtttgttgtttagttgggtgaagattgtgaagggtagtatgatgagtgtgatgattttttatatggttaggtttattgtgtgtgtggtgttgtaggtgtggttggttatttggtgtgattttgtagtggttaatattattaggtagtggttggtgtttatgatggtgaggaagtagaggttggagaaggtgttgtattggttgatagttatgatgagtttgtatatgagttttttgaagggttattgttgtagtaggaagttggtgatgttgatgggtagtattagtgtgaagagtttgttggtgatggttaggttgaggatgaataggttggtgatggtttttatgtggggtgtttgtagtaatatgtatagtatggtggagttgtttgttagatttatggtgtagattattgtgtagataattggtatagttattgttagtggtgttggtagtggtgttagagttgatgtgttggagtagtttagtgttgggtttgggtttgatgtgttggtgggttagggttttgagaatgaggtgttgtttattttaatgagggtagaggagttggtgatttggtgttttttaaggatgttttatggagtttagtggttttgaagtttggttttgtatggatttgtttgtggatgtttgttttagttttttaagttgttttttggtttttttggaggaggggattgtttttagttattttatggtttaatgttgttgtggatttatggggttggaaagaggaatttaaagtataggttagtttgttgatgtgtaattttagaaataggtgtggttttgaggaggggtgggggtggtgttgtggtgttttaaattttttttatgtgagtgttttttgttatttgttgaaattttatttttattagttgaatatattaaatgaaatgttagagagagaagaattttttataggaaaaatgtaaatttttttttttttttttaggaaatttttgtagatttaggttattttatagaattttgtagtggtaagttttggtttttttagggtttgtgtgtttttagtaatagtaagtttaatagtagtttttattttatttggttggttggggaaggggtttgttttttttggagttgttaggagaaaagtttgttggttgtggggaggttgagatgtttgttggttgggtgtttgtttttttttgtttgttttttttgagtttgttagagtttgtagtttgtgtttttgttggttttttttgtgtgtttggaagtgtagggatggtgtagttgtgattgtgttttattgttttgattgttgtgtttatttttatattttaagtaaaatggttttagaatagagaatagaaatttttttaaatttaagggattttttttttttattttagttgtgtaattttattttatttgaaataatagaaagtttttttgttaagaattgaatttaaggaaaataaagttagggtgtaagtgatttatttttaaaggagaataatgtagtggaggtgtttgttttattttttatatattgtaatataaataggttaatgtaatgtgaaatttgaaaggaggaaaaagtgagtgtaattttataatgtaaattatttgttttttgttattttggtttttaaggggatagaagattgttagtatgttttttaaaattatttttatttttatttttgtgtaagtaaagatttgattagtaaagataaatggtttttgtaaagttttttagggaattatgataatgtgtattttataaaatgttataagttgtttaatatattttttatttatttatatatttgtttgatttttttgttaatgagagttattttgtgattgtagtggagagtagttaaggaaggattagtaggggtagttttgaatttttttgttgttatttttttggattttggattttttttttaggaagggaaaattattttaggttttttattagtttttttaagaattgaatgaaataaattaaatattggttatttttaatttttgttttttttttttttttatattttttttaggagagagagtaaattaaaatatgagattatattttttagtaaattatttttttataaaagtaggtgaagtttaaataaagtgtatttttggttttttaggatgtattttagagaagggggtttgagatttagagagatttaaagttggtagtagaagattgtggggttagaaatatagtagtttttttatatttatgggggataggttttaagagttttagtggatgtttgaaattatggatagtatttattgtggttaatgggaatatgtttttgtttttttatttaaaaatgatgtaatagtaaaattagtatgtatttttttttttttttttatatttttgtggatagatttgtttttagtagattttggtaatttttgtatatgattttttttttttttttattaagtttagaatttttattttttaatttaaaggaggtatttgtagtttttttttggtatatttgaattgttagtattattttttttgtattttggagttagagagaaataagggtaaaaagttagtaaaattaaggtaatttgaagatattatattggttattgttatagttatttaataatttagattgtgaagtgattaataggtggatattgtagatagtagggaaatgttgggtaaagggaggatttattttttgtgggaaggagtaagatggttggattttattatgttaattagaagttaatataattgaaaatttaggaattgtttatttttggaattttttgtttaatatttttagattatagttgattatgagtaattgaaattagggattttaaaattattgatagggggatttattgtttaaaagttttttggaatttatttatttaattatttttttattaggatttatataaattggtttttttgtagttttatattttttgtgaaataaaataatagatgatttttaagttatgtttgtaagaaatattatatgataaaatattatataatgttaaagaaaaaatatatataatagaaaatttttaaatggttgaagatgattaattatatatatatatgtgtatatatatatatatatatatatatgtgtatatatatatatatatatatatatgtatatatatatgtatatatatatatgtgtatatatagatatatatgtatgtgtatatatatatatatatatagtgtatatatatatatatatgtatatttgtgtgtatatatatatatatatgtatatgtgtatatatatatatatatgtgtgtatatatatatatatatatatatatgtgtgtatgtgtgtatatatgtatatgtatatagtttatatatgtgtgtatatatgtgtgaatgtttgtatatatatatgtatatgtgtatatatgtgtatatatatgtatgtatatatgtgtgtttatatatgtttatgtgtatatatatatatgtatgtatatagttgattatttttaattgtttggagattttttagtttttttattgttgatttttagttgaattatattgtaaattgagaatatatttaatatgattttaatttatagatattttttgaaatttattttttagtatatagttattttttaattattttatgtgtatttgaaaaattgttttgtatttgttgggtgtaaaattttatatatgttaattagttaaatttattatgttgtttaaatttttttattgattttttttttttttttttgagattgggttttgttttgttatttaggttgaagtatagtggtgtaattgtagtttattgtagttttaattttttgggtataagtaattatttttttttagtatttttagtagttgggattataggtgtgtattattatattaggttaattttttgtattttttgtagaggtaggattttattatgttgtttaggttggttttgagtttttgagtttaagtgaattattaattttagttttttaaagtgttgggattatatgtgtgagttattgtgtttggtttttgttgatatttttatttaattgttttattagttattgaaaggatggggggggggaattttaattaatgagtgtgaatttttttatttatgtttttattatatgttgttaatttgtattatgtaattttatttttttttttttttgagatagagttttatttattttgttgtttaggttgaagtgtggtggtgggagtttgtgttttttaggtttaagtgatttttttgttttagttttttgagtagttgggattataggggtatattattatgtttagttaattttttttttttttgtattttttgtggagatggagttttattatgttggttagattggttttgaatttttgattttaagtgatttgtttgttttggttttttaaagtgttgggattataggtataagttattatgattggttaatttttattatataatttgatgttgttttattaagggtatatgagtttaagattgttatatttttttgtggaatttatttttttattttgatagtttaattataatgattttattattatgttatttgattttattaaatgattatatatttaatattataatatagaatatattatatataattataatattatttgtatatattattttttattattataatatttttaattaggtttttattttttttttttttttttttgttttttttttttttgagatagagttttgttttgttgtttaagttggagtgtaatggaatgattttggtttattgtaagttttattttttgggtttatgttatttttttattttagttttttgagtagttgggattataggtgtttgttattatgtttggttaattttttttattttttattagagatggggttttattatgttagttaggatggttttgattttttgattttgtgatttgttttttttggttttttaaagtgttgggattattggtatgagttattgtgtttagttattttttatttgttgtatgtggttatttttgtttgatattattatagttatattaattgtttttttattaatattattatggaatagttttttttaaaaaatttttttattttaaatttttttatgtttttgtatttaatgtgggttttatgtaagtattagaatatttgttttaatttaatttgataatgtttttgaagtattgagtttatagtatattaaatgtagttatagatagtattagggttgttatggtttgaatgtttttgtttttttaaaaaattatatattgaaagttaatttttaattgatagtatttggatatgggtttttgggaggtgattaggttttgagaatagagtttttatgaagggaattagtgtttttataaaggtgtagagtgtaaaagtttttgagggtgtgaggtattatagagagtttttgtgaagtttaatgtttagtagagttggggtaggttagtttttttgatttagagtagtaaagtagttagtgtgtgattttagttttaggaagttaggatgtaagttaggtattaagttgttttgggagtagggttatttaaagttgtggagataggtttattatattagtatgtttggaagtgagatatggaattaaagaggattatttttaagatttaagatttaatgttggttgagtgttgtggt

SEQ ID NO: 231 - DNA, 5849 bp, Artificial Sequence
  chemically treated genomic DNA (Homo sapiens)
attgtaatggtatgattttggtttattataatttttgttttttgggttgaagtgatttttttgttttagttttttaagtagttgggattataggtatgtattattatattttgttaattttgtatttttagtagagatggggtttttttatgttggttaggttggttttggatttttgatttttggtgatttgtttgttttgattttttatagggttgggtttataggtgtgaggtattatgtttggttataatttttaaatatttttttgttggtatttgtttggattatggatttaaatgatttattaatatgatgagaatttaatggggatattttaaaagagataaatgaatatataggtggtttgaaatgattttataaagttttttaataattatatttttttttagagtgttaaagaatttggtttatttaaggtgtttattttttaaaaaatggttatataaatgtaaattttatttaaattaaattttattttgagtttgttaaatgttatgtttagtattatttaaggtttatattaattgttgttttaaaaaattatatagtgttttaagtatttttatattttaaatataaaggaataattttaattgtggaattagagttgtttttttaagataaaaagataaagataaatattataattaattattaattggagaaatatttttttaaatgtttttgtaataattggatgtgttggatagtataattaaatttattaagaatagtgtgaaaaatattattattatttagtttttatatatagatatttttttaaattattgaaatttgtatttgaatatatgaagtattaagaatttgtttttgaaaaggaaatgaatatttgaaggttattttttttttaatttttttttatattaataattattgttaatatttatttttaaaaaattgtttttattaggtatttgggaattgtttaataaaagttatttaatgaaattatagtttagataaaaaaaaaaatttaattgtatagaaaatatttatgagtttatttttttaatttatataattgtgtttttgtttttaaagttttgtaatttatattagtgggaataaaaaaatttaatatatagtagaaagttggttttttaaaagaaagtatttttttttaaaggtaatgaaggattaaaaatttttttttttaaaaagattttagaagttttttttttagagaagatagaaaatattgataaattgtatattgtgtagatgtttagttttgaaatgtagttttgtagttttttattttgtagtttattggttgtatttgtatttttgggtagtgtttttgtagggtgtaaatatttagagatttagggatttggtagttttgtgtaggttttttgtgtgtattgtttagtgagtgggttttttgtagatggtgggatgttttaggagattgtgaggttggtgtagtttggtgagtttttggagggaaggtggtgtgttagaaaggattggattttagtaatggttttggattggttttgtgtggttgttttttttttttgttttgttgttgggatttttttagttagtgttgaattttttaattgggaaggattgagttattttattttttgggaagttgtgtgtttatttgtttttggtagtgttggagtttgagttggggattgggtggatatttatagagtttgtattgtagtgtgttgtatgtttttgtttttgtttgttggtttgtgttttagtgaattaattgtaaagttggtttgaagtggtgatggtgtttttgtggagtttatttgttgttttagtgtgtttttgagtagggattgggtttgttggggtttttgttgggtttgtgtgtttgtatggtatttgttgtatgagttgtttttgtgttttttttttgtgtttggttgtttagtttggtgttggtgttttatgttttttgagtgtaggagatttttttgttttggttttgtttgttggtgttggtgtttattttttgggtgtggaaatttgagtttattttttttggttgttggttttgggattgtgggtttggttatgtagttttgtttggatttaaagagttttagtttttgtgaatattaggtttgtgttgggagatgagaaggtgtttagtggggtttagtgtggttttgaggggtagggtgaggtttgtgatgttgaggttagttatggttagttataggtgttgtgtaaggaattggggaaagttttttgttaagaaagggaaatgttagtttagttaaaaaaaaaaaaaaaaaaaaaaggttggggtttaatgagaaagttttttagaggtatttttttagtttttttatagttttttgggagtttttgaatttgtatttgaatggtgtggttttgggtttgtgaaggtttggtgggttgaagttgttttttaggtttttaaaggaatgtagttaggttggaatttatttttttttttaatttttagaaaatggaaatgttttttttgtgatttttttttgttgagttagattttaggttttttttgttgtgggtgtttggttttttttgttgatattttggatgtttaggtttgtgggataaaaggtagttgtggtgttttgtgggttttttagtttgggagttggttttaggggttttaaagtgtgattttaggttgataattgtaagtttttaggtagaggggaagttttagtgttgagaagtttgttttgagaattttttgtgttgggtgtttagtttgagtgttttgggtgtggagtttatttttggtgtgggtagggttttagttgtaggtttggtgtagggtggatttggttgaagtttggagggttggaggtgttgggatgtagtttggataagagggtggatttgattttggaaagtttgtgggatttaggtattttaatattgggaagataaagagatttgatttttttgggattggtgaggggagtttggtggggaggggaatggtagggtagttaagtgtgaaagagaattttttgggtttaaagttaatgtagttattttataagttattttagaggtgattggaaaaaataataataataaaggtgtttagtaggttgtggttgggaaggaaaaataatgtttgtaagatgagtgtgttgatttgtagttttatattttttgtttattagttggaatatatatagatttatatatttagtaaatgtaaattttattatttaaagatgtgtttgttttggttataattgttttaagtgtttataggttaattttatatatggaatattttgaaagtgggtgatttgatttttaagtttaattggtttgtgttgtttgttgaattgtaaattttagtaaaatttaaatatattggaattttagttgttttttgggagtgaggaagtgggagtaatgttaaaaggggaaaagaagaatagtaaaaaaagtataaagatattattttttgatgtaaaattatgggattttttttaaatggtataagagaatttttggagaagattattattaattaataagtaataatgttttttagggtttattagatgttttatatttgtttgggaattttgattttttaggttttttgagaaatttatttgtttggaagaagttgtattttgttgttataggagttgttgagagttagggatggagattttagatttaggattttgttatgattttattgatttttaagtgttaatagaatgaaatggatatgtttattagttattataaattgaattattttatatgagagagagaaatgtggtttaagttttatatttgttttttaaataattgattttttttaattttgtttttaaaggtttgtggaaattagggagggggttggggagatggttttagaaataaaatgtttttttttagtatggtttttatatttagtttatttaagttgatttttgtaatttatataaagaatgggtttgggtgggtggttagtgaagattggggtgagtaagtgtttatgttgttgagtgttggggaggtttaggtttgtttttgtatagaattttgtaaggagtgtgttttgttaggtgtttggattagagggtgttgtgtttttgtaaattttgtggttttgatgtgttttttttaggtattattgttataataagttatatttaaaataatgtataaatagtattgttttttaagttttttttaatagtgttttatatgtattttatgaatttttaaagttatgtatatgaattttttattgttgatttgtataaagttagagggatgtgtagtttttggagttgagaatttgtagggtgtatatgtttttttgtatttgtttagagttatatattttatgtaattttattaatgtttaaatttaaatgttaaaaggtatgtatgatttgaataaagaatttattagtttagttgagtttttggttttgggttttaaagtttttggtagttttgtgatttttttgtggtgtagatatgtgttaagagttgggtttgaagtattaattttgtttttttgggatttttagtatgtttttaattagagtgttaatgtttgtgttgttgggatttaggtggttgtatttttggaggtttttgattagggtaaatttaagtattaaatgtaggtgaaaagagagtgtgtggggttggaatgagggtttgggagtagttaagtttgttaggatgtgtttaggtagttagttgttgagttgaggagttgtggttgttggttgtggtgatttgttgtttttttttttatttttttttttttggaggtggtgggggaggggaggtgatgttagtgttttgttttgttttttgttttgggtgtggatgggattttttggttgggtgtgttattttgatagtggtagtagtggttgtggaggttgtgggggttttggtttttgtggtttttttggttggttgtagttgtggtgtgggtgaaatgtttgttttttttttttggttgtgttttttgggtgttggtgagtgtgggtgttttttgtatttagtgtttggagttgtttggagttttgttgtgtgtatttttttggtttgtggagtttttttggtggtgttttttatgttgtggattgtaggtgatgtttttttttttttgtagttgaaatttgttgtgatgtgttgtttgttagatttttgttgggtggaagtatgaatagtttttgtagattggtttggatgatttgtattttgtggttttttaatttttggatgtgaatttttttttatgatttattattatgttttttgtggtttttgtgttgaaaattatggagttgtatttttatttttaaatttttttttaatgttttttttgttttgattgtattttgaagtttataaggttttgagaggagggggtgaagggataggggaggagttagtttttaatgtgttttataagttatttttagtgataggggttaatatgtaaattattgttttttttttgaaataatatttatttagataaatgtaaatattgttgaggtttaatttataaagaatgtgttgtttttatgtaagtgtttagtttttaggaaaatatttgttgtggaatatatttttaatgttattaaagtattaaaatatttttttgaatagtgtgaaattttgagggagttatttttgtgagttgatattgtttttagaagattgttattaatatttaagatttttgtaaaagggggttgggggtggttttattatatttgtatttgttggtataaatatgttgattagtttagttggttgttttttta

SEQ ID NO: 232 - DNA, 5849 bp, Artificial Sequence
  chemically treated genomic DNA (Homo sapiens)
taaaagaatgattagttaaattgattaatatatttatattaatggatgtaaatatgatagaattgtttttagtttttttttgtaaggattttgaatgttaatgataattttttggggataatgttaatttatagaaatggtttttttggaattttatgttgtttggggaggtattttggtattttagtggtattaaaaatatattttatagtagatatttttttggaggttggatatttatataaagatgatgtattttttataaattaaattttaatagtgtttgtatttatttaaatggatattattttgaggaggagatagtgatttgtgtattagtttttattattagggatgatttgtaagatatattaggaattggttttttttttatttttttgttttttttttttagaattttataagttttagagtatggttaagataagaggagtattgggaaagaatttgaaaataaaaatatagttttgtgatttttaatataaagattatgaagagtataataataagttgtgaaaaaaaatttatatttagaagttggagggttataaagtataagttgtttaggttagtttgtagagattgtttatgtttttgtttagtaaaaatttggtaggtgatatattgtgatgaattttggttgtagaagaggaagagtattatttgtagtttgtggtgtgggaaatgttgttggaggggttttgtgagttggggaagtgtgtgtagtggggttttaggtggttttaggtgttgagtgtgaggaatgtttgtgtttgttggtgtttgggagatgtagttgaaggaggagggtgggtgttttatttgtgttatagttgtggttggttagagagattgtagaggttgggatttttgtagtttttatggttgttgttgttattgttggggtggtgtgtttagttggagaattttgtttgtgtttggggtggggggtgaggtggggtgttgatgttatttttttttttttattgtttttaagggggagggagtggggaaagaggtagtgagttgttgtagttggtggttgtaattttttaatttggtggttggttgtttgggtatgttttgataaatttggttgtttttgggtttttgttttggttttgtgtattttttttttgtttgtgtttggtgtttaagtttgttttggttggaagtttttggagatgtggttgtttgggttttggtggtatggatgttggtattttggttagggatatgttgaagattttggggaggtaaagttggtattttaaatttggtttttaatatatatttatattgtgaggggattatggagttgttgaggattttagagtttagggttgaggatttggttagattggtgagttttttgtttaaattgtgtatgttttttggtatttaagtttaaatgttaatgaaattatgtggggtgtgtggttttaagtgagtgtggggaagtgtgtgtgttttatgggtttttggttttaggagttgtgtatttttttggttttgtgtggattggtgatgaaagatttgtatgtatagttttgggagtttataaaatatatatagagtattgttaaaaagaatttgagaggtgatgttgtttgtgtattattttgaatgtaatttattatagtaatggtgtttagggagggtgtattggggttgtgagatttgtaggggtgtagtgttttttagtttgggtatttggtgaggtgtgttttttgtagggttttgtgtggaggtgaatttggatttttttggtgtttggtgatgtgggtgtttgtttattttagtttttattgattatttatttgggtttattttttatatgagttataaaaattagtttgggtggattggatgtagaggttgtgttggaggaaagtgttttgtttttggaattgtttttttaattttttttttaatttttatgagtttttggggatagggttagggagggttgattatttaaaggataaatgtggaatttgaattatattttttttttttatataaaataatttgatttgtggtagttaataggtatgtttattttgttttgttggtgtttaaggattagtagaattgtggtagagttttaagtttgaaatttttatttttggtttttggtggtttttgtggtgatgaagtgtaattttttttaggtagatagattttttagggagtttggaaaattgggatttttagatagatgtaaaatatttagtaagttttaggaagtgttattatttattaattaatggtaattttttttaggaatttttttgtgttatttaaaaaaaattttgtgattttatgttagggaatggtatttttgtattttttttattgttttttttttttttttttagtattatttttgtttttttgtttttaggaaatggttggagttttggtgtgtttgggttttgttgagatttataatttggtaagtggtataagttggttgggtttggagattaggttatttatttttgaggtgttttatgtatgaaattgatttgtaagtatttggagtaattatggttgggataaatatgtttttggatgatggagtttgtatttgttggatgtgtgaatttatgtgtattttaattggtgggtagggaatatagggttatgaattggtatatttattttgtaggtattattttttttttttagttataatttgttagatatttttattattattattttttttggttatttttaagatggtttataaggtgattgtgttaattttgaatttaggaaatttttttttatatttgattgttttgttgtttttttttttgttaagttttttttattagttttagggaaattggatttttttgtttttttagtgttaaaatgtttgagttttataaattttttgagattaagtttgtttttttgtttgggttgtgttttagtgtttttggttttttgggttttggttgagtttgttttgtgttgagtttgtggttggagttttgtttgtattggggatgggttttgtgtttgggatgtttaggttgggtgtttggtgtggggagtttttggagtgggttttttggtgttggggttttttttttgtttaggaatttgtagttgttggtttggggttatgttttggggtttttggggttgatttttgggttaggaagtttgtgggatgttgtgattgttttttgttttataggtttgggtgtttggggtgttagtgggggaggttaggtgtttgtggtggggagggtttggggtttaatttggtagaaaaaggttgtgggggaagtgtttttattttttggggattgaaggaggaagtagattttgatttagttgtatttttttggagatttgaaggatgattttagtttattaaatttttgtggatttagagttgtgttatttaaatgtagatttaggggtttttagaaggttatggaaaagttaaagggatgtttttgggaagtttttttattaggttttagttttttttttttttttttttttttagttaagttaatgttttttttttttggtagggagttttttttaattttttgtatagtgtttgtggttggttgtaattaattttggtattataagttttgttttgttttttggagttgtgttagattttgttgggtgtttttttgttttttagtatggatttggtgtttgtagggattggggttttttgggtttgggtgggattgtgtggttgagtttgtggttttagagttggtagttggggaaagtgggtttgagtttttgtgtttgagaaatgagtgttggtgttggtgggtggggttggggtggagggattttttgtgtttggggagtgtgaggtgttggtgttgagttgggtggttgggtgtggggagagggtgtgggagtggtttgtgtggtaggtattatgtggatgtgtgagtttggtgagggttttggtaggtttggtttttgtttgggggtgtgttgagatggtgggtgagttttatgagagtgttgttgttattttgggttaattttgtggttagtttgttggggtgtgggttggtgggtgggggtgagagtgtgtagtgtgttgtggtgtggattttgtgggtgtttgtttggtttttggtttgggttttggtgttgttgaaaatggatgagtgtgtgattttttggagggtggagtgatttggttttttttagttgggaaatttagtattggttaggggggttttggtggtggagtgggaaaaggaggtgattgtgtgggattgatttggggttattgttggggtttgattttttttgatatgttgttttttttttgggagtttgttgggttgtgttggttttgtggttttttggggtattttgttgtttgtgaaagatttgtttgttgagtggtgtatgtgggaggtttgtgtggggttgttgggtttttgggtttttgggtgtttgtgttttgtaggagtgttgtttggaggtgtagatgtaattggtggattgtggagtgaagggttgtgaggttgtattttggggttgaatatttgtataatgtgtggtttgttagtgttttttgttttttttggaggaggaatttttaagatttttttaaaagaaagagtttttggttttttattgtttttaaaaaaaaatgtttttttttagagagttagttttttgttgtgtgttagatttttttgtttttgttgatgtgaattgtaaggttttggaaataaggatgtaattgtatgagttaggaaagtaaatttataaatattttttatgtagttaagtttttttttttgtttgaattgtggttttattaagtggtttttgttaagtaatttttgggtgtttgatagaggtgattttttaaaagtggatattaatagtgattattagtatgagaaaagattgaaaagaaaatgatttttagatatttattttttttttaaaagtagatttttaatgttttgtatatttagatataggttttgatagtttaagaaggtatttgtgtgtgagaattaggtaatggtgatgttttttatattatttttaatgagtttggttatgttgtttaatatatttagttgttatagggatgtttgaaaaggtgtttttttagttaatagttaattgtgatatttgtttttgtttttttgttttaggaagatagttttgattttatagttagaattatttttttgtatttaagatgtaaaaatatttaaagtattatgtaattttttaaaataataattggtataagttttgagtgatgttaaatatggtatttaataagtttaaggtaaggtttgatttgaatgaagtttgtatttgtataattattttttgaaaaatgaatattttaaatgagttaaattttttggtattttggaaagaagtgtggttgttagaggattttataaaattattttgggttatttgtatatttatttgttttttttgaagtatttttgttgggtttttattatgttagtagattatttaaatttatggtttggataggtgttaatagaaaaatgtttaaaaattatggttgggtgtagtgttttatgtttgtaaatttagttttatgggaggttgaggtgggtggattattggaggttgggggtttgagattaatttgattaatatggagaaattttgtttttattaaaaatataaaattagtggagtgtggtggtgtatgtttgtaattttagttatttgggaggttgaggtaggagaattgttttaatttgggaggtggaggttgtggtaagttgagattgtgttattgtaat

SEQ ID NO: 233 - DNA, 12201 bp, Artificial Sequence
  chemically treated genomic DNA (Homo sapiens)
taataattgtgtagttattgtttttgtatgttgttaataaggtagatagatgtagaggaaatgtttttataattttttggaatgtagatatgaagtgtaaattgaatttttggtagatggtagaaaaggtgatttgataatgagtttgaaataattaaagtgatatttttatttatttatttttataattttatttattttgaggaaagtttagaggattggaatatggatataaaggaggataatttaagattgtaagttttattttttgaaaggttgtatttataagtaggttgttagaggttgtgtttttttttttattttttgtatttaggagtttggaggattttgttgtttattttttgttttatgttaattttatgagatagggatattgttgttttttgtttagtaatttttgggttgtttgattattattttttaggttagtgattggatttatttttttttttgtgtatttatgggtaattgaggttatttgaggttttggttttgaatgaatttgagtagtgagagatttataataaagaattaagtgtggttttttaggggttgtgtttgttatttagggattgaaagagatttgtgggatgattttttgtttttttttagtaggaattagaataaggggtgtagatttggtttaatttttttgttttggttaatgggaagatgaaatagaaaaatttttttttatttgtaatatggagatttagggggttgtttagttagaaggttggtaaattgtaaaatggtggggtagggggttaaggggatggttggggtttttttgtttagttttttttttattttaggatttaggttaggttaaatttttagtgttgtgtgtgtttgaaagtagataggtgggatttttggaaagaatatatataatatagtttttgagttttagaaggattttaagataggagtttttgagttttgaataagaggttatttagggtaaagtgattgatttttgtgtggtgtggttgagaagagaaggtgttgttgattttttggggagtaagttaataatttagttgagttgatgaagtgatgttttttttgaaaggggttgttttttgggtttttttttttagttggtatttagtaggtagggaggtagggtaaatttttttttttatgtgaagttataaagaattgatgagttttaatagtatggatttgaagttgtagataattttaaatatatttgtgttagagtttatatttttgtttatttttgtggagttggagtagatagtgatttttaaaattgtttttaaaattttttttgaattgattgggtatttattgggatttgaggggtttttttttagtttttaaattattgttatatgtagaatatattggtagatgttattaatgattgtttatttttttttaaaagttgttttgtttatgtattatttagtttatattaaattgttttgatatgttttagttgttagtttaatttataaagtagttgtaatttttgatattatttttgtagtttatttgaggatttttttttaggatattttatgaggttgttttttgagggttgaattttgagatttaaaggaaggttatttgaggtattttggtatatttttgggtttttaatttttttttttgtttggttggtaattttttgttgttttttttttttttttatttgattttttttgaggtatttttgtttttttttttttgtttgtttttagtaaatttttagtgggtgggggaaattaattttttggtgttaaagttaaatttagagttgtttgttggataggattgtagtggggtaaatggtgtttgtttttttagaaagaatgattaattatatggaggtaatttgttttgggttttttgagattttgggtggatttgtttgtgttttgttagatttagtgtaaatgtagattttagttgaattggttaggatttgagagatagttgttttattttttggattgtaattatttttgtgagaatttgatatatttaatgaaagttttgttaaatgtatgggttagtgtgtttttgggttattattatttgggttagtatattgtatttattagtgttaatttgggttttatgtagtagaatttggttaaaaattgtttgtttttggttatttaggagttttagggggtagggggaagtaagaaaaaggttttatttgatattgttagttgtttttgataagttatagtaaatatttttagaagtataattttaaagggagaatataaatttttgtttttgtttggttgaatgtttttttgtaattaattgtggatttttgtatgtttaggattgaattgaggtttgtggttttgtagttgttttgatgttgggagtatgaaattttattttggttgagaattgagtaatagattgtataagaatggtgttttttggtttgttgtttgttaagaaatattaggaaagttggtgttagaaataattatttgaatttagaaagtaaggttaggaagttttgtgtgtagagaaaatttttgttaatttatttagattgttttatttggttaataaagtaattgatatttaataaaattataattgtagtaggagttttaggtattagaataagaattataattaaaggtttgttgttgttaataattgtttttattattattgtttagtatttttttaagtaaaaggaaagaaaaagagaattattttatatttattggtattttttttttttttttgaaattagagtatagatttttttgattgttttttaataagttattattattaatgggaagagatgtaaattggttttaaatatttatattttgtttgtggtggaatataaatggttaattgtaattttttttaaatgtatataattttatttgatttttggatatgattaaagatattgaggatttatatagttttattttatattattagagattatatagaaaagataaaaatgggaaaggggatatatatgtatttatttaatatttatttttagaggtaaataaaatttttttgttttattttggtttttaaattatatgatgtggatattagaaaatataaattttttagttatatatatttttttatttgaatattttatttagtaaaattggtagtgtaatttattttatttttttaaatttgattttgatgtgagttaaatatatagtattatttttttgggaataaatttttaaatttatatttttattggaaagttgattaaagttttttttttttttttagttttggttagatgagaaggaataagttgttttattgtttgtgattttttaaagaaataatttaaaatttatttatatttgttagaggttattgggagataaataaatgttaaatgtgtaattttattttttaattgtaattaaaatttatttagatttttgaaatgtagtttgagagtatgatgtttgtgtaggaatttgtatttgatattaagtttgatgtggaatgtttaaatggtaattaaagtagagaaagtaatagtatataaaaatataagtttaagagtttattaggaggttgggtgtaatagttatattttggaaggtgtatataagggtatatgggtagatgttatagattttagaggaatttaaattttagtattttttttatattgaaagatattgttagatatattgaggtagtttggaggtgatggggattatatttaataattatttatattttttatttttttagtaaaggaattaaattagagatttatattattgttgtttttaaggatatatttttgatttaataatatataaaggttaaaatgagtttttttttgagaggagagggtttaatttttgttttgaatataagaggttgtttttgtgattaagtattatggataaattgtttattagttttatgtatataaaattttatagatatatttgatgtattaaatttatatatagtaattagttgaggaaattataataatttatgattaatttagaattttaaggtaaagtaaaattataaagtttgttattttaatttggattttaatgtaaaatgtgttatgatatatgtattgaattttagagtatgtttattatggtggggttttttaaatgtttttttttaatgttggtatttttattatgtgttttgtttttattagtttaggaatttattaagaaaatatttgtttataataatggtgtagaatgaaaagaggaaaatgttgtttttattattaaggtgaaattgtttattattaaaggttttttttaagttgtatgtaagtttttttatttggaagtgttattatttgtaataattttttgtaatagtttattggtttagggagttaaaatattatattgtgggtgggaggtgggggttggtttgaaggaggatggatagtgagggtgttttgtggattttaaatgtaagttattaggtttttggtggtttttggtgtttaattttattttataaaagtggtatgatggaatatgattaggtaaaattttattttttggtattgtggtggtatttttttttttttttttttttattagggttaatatgtttatttttatgggaaatatatataaatattaggaagatttgttttgtattgagattaatagtattagttttgtaaaagtagtttgataaaaggttttatatatttaatattagagattagaaatagattaaaaaaaaaaaaaaaaaaaaatatatattatataattggtaaatttattaatttaggtttatttaatttttgtttttatatatgtgttttaaaataatttataataaaaatggaagggaagatagatttaatttgaaattttttttgagaaaaaataaattaaaattagtttttggggaagaaagttttagttaggttaggaggaaatttatgtatttttgattttttttttgttttggagaggtattatttgtttaagtttagttaatgtggttggttaggatttatagtttttattaagggttagattttgtgaaagatataaagaaaggagttttttaatatattgggtttttttatagtaataagatattgaaattaagttttttatggtttgtgtttgtaggattttttagataaaattggtagttttattagataagaaatggttttttagaagttttgggggaagtgtgggggttttttgtggtttttttgtgattgtttttgggagattgtaatagatgatgggaatatgtaagaatgattgaagaaggttattggtgagttgtatttaatagttttttttttttaagtagttttttgagagaaaattatatattaatgtttggggatgtgaaataggttttttattgttttgtaataaatttttttttatttgtgtttttagattaatgtatttttaaaaaatttttataaagttatggagatttgtttttataattattaaaatattatagttagttgtataagtttgtttaaaaataaagggtaggagattagtagtgagaagaattgaatagtatataaaaattttataaattttagattattgaaagattattttgttttttggttttgggttagtgagttttaattttagagttaaattgagaagtagattttgtgggtttgaaagataaaaagttagtttgtggagttaattttggtttattggtgtgttttaatttgattgttttaatagtaagaagtgtttttttttttttatttaatgtttttagatatttgaggttgggggagatggagtaatggtgtagtagttaggaaatagtttttttgggtttaattattttatttttgatttttttttttttagtgtgttgagtgtagttagttttggaggaattagttttttggagtagttaaggtaggttaggttttggggatgtgtattatggtgtggggattaaattaagttgaatggtttgttttaagtttttttttttttttagagtttgggagggattttgttaataggtagatttatttattagttatttgttattggtggtagaaagtgagttttgtgtgtaatgtggttagttggattgtggggattttaggagtgtagggtggaggagtagtgttataggaggtgagggtgtaggtggtgtggttgggaaggaatgtgggaggggatagaaggaagaggaagaggaggagagggaggttagagttagaatagtttggtagtttgagttttgggggagaatggtttgagttttgagtaagttgttttgggagttttaatttttttttgttggtttgttgagtggttagtggtgtttagtggtggtgaggttgaaatatgataattagaatagttgtgttgtgtgttttgtagttaatgggtgtggtgtttgtttgatgtttttgtgtgttgtgttagattaatggtgatggagttgagttggagtagagaagtttgagtaagagataaggaagagaggtgtttgagttgtgttgagtttgttgttgttgtagtgtttttgttttgttaattttgttggtttaaattggatttttagatttgtgagggtgtggtgtagttgagtagtggtttttttagtattggtaattttaggggttaatattttttatttagttatagttttagtattttttttgtgggttgtttattaattgtataattattattttattgtggatattatttttttttatagatatgggagatatgggagatttattaaaaagtaagaggttattttattttgtggggtttggtgtgttgtttttgtgtggggtttttttttaggtataggttgaggtgttaagggttttttggagttggagttattgtttggagaaagagaaaaggtggtttttttttgttgttgttatgtttgtatgtttattgttggtttttatttttgggaaattgattgtattttgtgtgtgaatttgtttgtgtgttttttaaagttttagttttttggtgttaagtggtgatttttttttggggaattttgagttttttgagaaggttattatgttgtaaaggtttgtttgtatagttaatgtttagagatgtgaattagtattagatttgtaaaagagaatgagtgataattgtatttatgtttgtttttgttaataatatttagttttgtgtgttatttaagagtgtgttttatggaaaatatagatatttttgtgtttatttaatgtttttagttaaaattttttttttgatttgatttatttataattttttttaatgattatagtaaagaggaaggggggggggagaaatataaaatgagtgggtttgattgtgtgttaggtgtataaatgtagattattttaatttgtattttatatatattttatttttttttaaaaatgagttaaggttttgatggtatattttaattattattttaaagtgtaatgttttaaaaaaaaaaaaaaagaaagaaagaaagaaagaaaaaaattttttagagtatgttttataagagaatgatattaaaagtgtgtttatttttgtaggaagtaaatggttagttaattatgtatttatttttattttagaaaaatgtttgatttttttatgtgttggttgtggtaattagatttatgattagtatattttgagggtttttttggatttggaatggtatgtggtatgtttgaaatgtgtggagtgtaattagtatttggatgagagttgtatatgttttgttagggatgggaaaatttattgtaaaagagattatattaggtatggtatttatattttttttttaattttgtgggatttttttgaatttttttattttttatgtattatttggtgtggttttgtttttttgtgaagtttgttttagtgtagttatataagttaaagttattttgtatatgtgttaaaaaaattaagttatgttgtttattttattttttagttgagaaaaataaaaatttttaatagtggtatttataattttggggtattgaggtttgtttaattatttttggagtttatgatgtataaattattttttttttttatttttttttttataaaataaaattttaaaaagatggagaagtttggatttttagttttaaaatagggttgatttttgttgtatagtgtagtgttttgtttgttttagttttttttaaaattagtagtttataaattttttggtggtattaatgtaataggtgaaataaaagtttgattgaagtatgtttagagatgtattttgaaagagtgagtataggtattgttttttttatttttggggtaagatttttttttgagaaaaatttaaaattaatttaaatattttttggaaaaaatattggaaatttaatttttttaaatattaattttttggtgatatttaattgtttttttttttttattttatttgagttgatgaattagagtagattaaattgtttattatttgtttatgaataattggtatatttagataattgaatagtttttttttttatattaaaatttggtaattgataaaatgagtgaattgtttaaattgataagattgaaataatataggaattttttgagtttggttttgttgttttggagagtttttgtttttttttttttttaatttattttgtaatatgttttgttaattttaagttttttttgatttgtgtgtatgtattagaaattttgttttttgttttagaaagttagtagtttttaaagaaaattgtatttattttattaataaatagaagagatattagtattattattatgttaaataatagtaaaatattattttttaaatgtttggtggttattaataagtaattaattagtttttgttaggtaaatggtttttggagtttgagaatttttattaaagtttagttaagatttaatatatagttatagtttgtttttgtttatttagtatttagtatttttttttttttttttaaaaattatgatatagagagtataattttggtagataaaattaatttggttgggggaggttaatattttggagagggagtgaaaggaagtaagggaagttggggtataggaagggggagggattttttaaattgtttggttattgttaaagttaagtttttattttatgaaatggaagattttatattgagtaggtggagggaggaaaaatttttgagtttattttttaatttttgataaatgagtgtttttattgtttattagattggtgtgtaaatgtaagattttagagaaggagagtttattttaggagtatttttattgttatggaaatagtattttgtttaattgtatataggtttgtatgtgtttaattttggatatatatatgtgtagaaggaattaattatttttattttttttttatttttttttaattttgtgtgtgtgtgtgtgtgtgtgtgtgtgtgtgtgtgtaattttgtagttgtaaaagtagaatagattggatagttagatttttatatttttttttggagaagtaggatgtttttttttgttatgtggattttttttttttttttttattttttttgtttgtaggaatgttttagtttttgttatttttgaaagatggagaaggggttagggaagtgtagtttagatggaatttataaagattgttttttggtaaggaaaggttaggagtgagaaagattttagaagtgggtttttgtattttttttattttggttatggtttttaagaaaattgaaatgaggtagatgatttagtaatttgaaaaagattgagggaatagatgtagatttttttaaaaaaataataatataaggaagaatggagaggaaattttttgttaatattgttgtttgaagaaaatttttagttggagaaagattggaaagtatttgtgtaaaaggagatgtggaaatttttagaggttttattttgttattttgtttgtttatttgtgagtgtttgtaaattgagtggggtgataattttttttttttattttttttttttttggaaggaggattttttgttgtagttttagatatttttagtagtagaaattgtgggatagggaagtgaaagtgttggtgttggtggttattagagtttttttggatttttttttgttaagatttgtaagattaatattgggattgattgttagagtagtagtttgagtttggaatttattaatatattttttgtggtataagttaggtgttttgagttaagagttattaattaagatagaggtttattggaaaggaaatgggagtaaaagaaagggaggagggagggaggggaaaagagagatgggggaaggaagagagatagggaaggagagagtagggttttatttttgtttttttgtttttaatttttgtttggaaatgttgtttatttggggtgttttgtttgggattttgggttagggaagtgttggtttgaagtgattttttttttttgtatttttttttttgttttgggttgtttttgttttttttttttttgtataggttgtatgggattaaatgtgttaagtgtagtattggttttagtaagaatgattttgtgatgtgtgtttgttttaaggtgtattatattgagtgtttttgttgtgtggtttgtagttgttagtttatttttggggatgaatttgtgttttgggaggatggttttttttgttgagtagattatgatgtggtggagagggttagtttaggtgttggtgatttgtttagttttttgtatttagtgtggttattgtaaatggtaggtatttttttgtttggtttgggtaggtaggtgttaggttaagttagtttgtgtgttagtggttataataattatggtagttataggggtggttgtagtgtttgtttgtagttaaatgaagtgttttgtatgtaatttgtgttgtgttttgtttttttgtagtaaggtttaatgtatttattgttttttttgattttttgagtatatttatattgtttgtgtgtttttatatggttatatataaatgtatattatttgtgtatatgtgtatatatatgtttaaatattatttttagtttgttttggtttttaaattttggtttgttgaaaatgggttttagtttttagttaggtatttttttgttgtttaattaaaggggtggagttttgggtttttggagttttattttttaatttaatgaaggaagtttaggtggtttgaagttatttagttttttaaattttttttttttgtgagttgttttatatttgaaattttttttttaatttttttatttttttgtgagagaataggattgaaaagatatagttttaaaaattgtaggttattgtatagagttgtaatataaaattgttaataagtttatttgtagtaattgttttttaaagggagtttgtttttttaaattatttattttatatgatttggtgagaattttatttttaggtttatggttgtagttttaaattgattttataggtgttggtttgattttagggggttgtagaaggtgtaggatttgtattatgtagataagaggatttatttttaaggaagaggagtggaaatatagtaaggttggttgggattaaagtagtgggttagaaggtggatagtgtttttaaatttgattttttgttatgaatagatttatttttttgtagttttaaagtattaatttttattaaatattgaaggtgaggaaattatagtttttttttatttttttgttttttggtagttttaagaattttgtttagggggatttgtgattagtttgtattggggtatggttggggtggtgtttttgtttagtggagtttgtattttgtttgtggggaagtatagaggaagttaaaatattgagagggaggtgggggatattttttagttattgtttatttagagtttaggtagtttaatagagtttttgttttttattgtttgggattagtttattttaggaatatttatgtattattttagatttaatattaagagtagggattggagatatggtagaaatagtgaatttttttagtttttttatatgattgtttttttggattgaagtttaaggtgttttggtagagtttttgattt

SEQ ID NO: 234 - DNA, 12201 bp, Artificial Sequence
  chemically treated genomic DNA (Homo sapiens)
aggttgagaattttgttagaatgttttgaattttagtttgagaggatagttatgtgaaggggttgaagagatttgttatttttgttatatttttaatttttgtttttagtattaaatttaaggtaatatatggatgtttttgagatgggttgattttaagtagtggaaaatggaaattttgttgagttgtttaggttttagataaatggtggttgggagatgttttttgttttttttttggtattttagttttttttgtgtttttttataagtagagtgtaggttttattgaataggagtattattttagttgtgttttggtgtaaattagttataaatttttttgaatagaatttttagagttgttagaaggtagaagggtaagggagggttatagtttttttatttttagtgtttagtgggaattgatattttaaaattgtaaaggggtagatttatttatggtaggaagttaggtttggaaatattgtttattttttaatttattgttttggttttggttaattttgttgtgtttttattttttttttttgggaatgagtttttttatttatatgatataaattttgtattttttataattttttagggttaggttaatatttatggggttaatttagagttataattatgggtttgaagatgaaatttttattaaattatatagaatgaatgatttaaagaagtaggttttttttaaaaggtaattattgtagataagtttgttgatagttttatattataattttgtgtaatggtttgtagtttttaaaattgtatttttttagttttgtttttttatagaaagataaaaaaattaaaaaaaaaattttgagtgtgaagtaatttataaggaaaaaggatttgggagattaaatgattttaggttatttaagttttttttattgggttaaaggatgaagttttagggatttggggttttgtttttttaattaggtagtaggagaatatttggttgggagttgaagtttgtttttagtaagttaaggtttggaggttagagtgaattggaagtaatgtttgggtgtgtgtatatatgtgtatataagtggtgtatatttatgtgtaattatatagagatatatagatggtgtaggtgtgtttggggaattaagggagatagtgagtgtattgaattttgttgtaaaggagtagagtatagtgtaaattgtatatagaatattttatttaattgtaggtaaatattatgattatttttgtagttattatagttgttgtggttgttggtatataggttggtttaatttggtgtttgtttatttgagttgggtagaggagtatttgttatttgtagtggttgtgttggatgtaggggattgagtgggttgttagtgtttagattggttttttttattatattgtggtttgtttggtagaagagattgtttttttgaagtgtaaatttgtttttagggatgagttggtggttgtaggttatatagtggaaatatttgatgtgatatattttggagtgggtatgtattatgaagttgtttttgttgaagttgatgttgtatttggtgtatttgattttgtataatttgtgtgggggaggggggagtggaggtggtttagagtggggagagaagtataggaagagggggttattttaggttggtatttttttggtttaagattttgggtaagatgttttaagtaaatagtatttttaaatagaagttggaaatagaaggatagaaatgaaattttgttttttttttttttgtttttttttttttttttatttttttttttttttttttttttttttttttttttttatttttgttttttttttgatgaatttttgttttagttggtaatttttagtttaaaatatttagtttgtattatagaaaatgtattgatgggttttaaatttgggttgttgttttagtaattaattttagtgttgattttgtagattttggtaggaaggaatttagaaagattttggtggttattgatattaatatttttatttttttattttataatttttgttgttagaaatgtttaaaattgtaataaaaagttttttttttaagaaaaaaggaggtaggagaaggggattgttattttatttggtttgtaaatatttataaataaataagtagaataataaaatgaaatttttgagagtttttatatttttttttgtataagtattttttagtttttttttaattaaagattttttttaggtagtaatgttaatagaaaattttttttttatttttttttgtattattatttttttaaaaaaatttgtgtttgtttttttaattttttttaagttgttgaattatttattttattttaatttttttgaaaattatgattagaatgaaaaaaatgtaaagatttgtttttaaggttttttttatttttggtttttttttattaagggataatttttataggttttatttaggttgtatttttttggttttttttttattttttaggaataatagaagttggggtatttttatgaatagaaagaatggaagagagaggaaaagatttatataataggaggaggtattttgtttttttaaggagagatgtggaaatttaattgtttagtttgttttgtttttataattataagattatatatatatatatatatatatatatatatatatatagagttgagagagagtgaagagaaggtaaaaatgattagttttttttatatatgtgtgtatttagaattaggtatatgtaagtttgtgtgtaattgagtaaaatattatttttatagtagtaaagatatttttgaagtgggttttttttttttagaattttgtgtttatatattaatttagtaaataatgaaaatgtttatttgttagaggttagaaggtggatttaaaagttttttttttttttgtttatttaatgtgagattttttattttatagggtgaagatttgattttggtggtgattaaataatttagaaaatttttttttttttttgtattttgattttttttatttttttttattttttttttgaagtattaattttttttaattaggttaattttatttattaagattatattttttgtgttatgatttttaaaaaagaagaaaaaaatgttggatattaagtgagtaggagtaaattgtgattgtatattaaattttaattaaattttaataaaagtttttaagttttagaaattatttgtttaataaaagttaattaattatttgttaatagttattggatatttaaaaagtgatattttgttattatttaatataataatgatgttgatgttttttttgtttgttaataaaatgaatataattttttttagagattattggttttttaaggtagaaaataaagtttttgatatatatatataagttagaggaaatttgagattagtaaaatgtgttgtagaataaattggaggaaaaaaaaaataaaaattttttaaaataataaaattaaatttagaaagtttttatgttgttttagttttgttaatttggataatttgtttattttattagttattagattttaatgtgagaaaggaagttgtttaattatttaaatatattaattgtttgtagatagatgatgggtaatttgatttgttttaatttattagtttagataagataagaaagaagagatagttagatgttattaaagggttaatatttaaaaagattaagtttttggtgttttttttaaggaatatttaggttggttttaaattttttttagaaggaggttttattttaaaaataaaaggagtaatatttgtatttgtttttttaaagtatatttttaaatatgttttggttaaatttttattttatttattgtattgatgttattaaagaatttgtaagttattaattttaaaaaggattaaaataaatagaatattgtattatataataaaaattaattttattttaaagttaaaaatttaaatttttttatttttttaaaattttgttttgtaagggggagggtgaaagaggaaaataatttgtgtattataaattttaagagtaattaaataagttttaatattttggaattatgaatattattgttaagggtttttgttttttttaattaaagaatgaaatgaatagtatagtttgatttttttaatatatgtatagggtaattttggtttgtatgattatattgaggtaaattttataaaaagataaagttatattaaataatatataaagagtggggagatttagggaaattttataaaattaagaaagaagtgtaaatgttatatttgatataattttttttatagtaggtttttttatttttaataaagtatgtatagtttttgtttaaatattgattatattttgtatattttaaatatgttgtatgttattttaaatttggagaaatttttagaatatattgattgtgaatttgattgttgtaattaatatatagggaaattagatgtttttttgaaatgaaaataaatatatgattgattaattgtttattttttatagagataaatatatttttagtgttgtttttttatagggtgtattttgggaggtttttttttttttttttttttttttttttttttttttttagagtattgtattttgggatggtaattgaaatgtgttattaaaattttgatttatttttaaaaggaggtggaatatatgtaaaatgtagattggaatagtttatatttgtatgtttagtatgtaattaaatttgtttattttgtattttttttttttttttttttttttgttataattattgggaaagattatggataagttaagttaaagaaaaggttttgattagaagtgttaagtgaatgtagggatgtttatattttttgtgaagtgtgtttttaaatagtatataggattggatattgttagtaagagtaggtataaatatagttgttatttgtttttttttgtaagtttaatgttaatttatatttttgggtattgattgtgtaggtagatttttgtaatataataatttttttggagagtttaggattttttaggaggaaattattgtttagtattagaaagttagagttttggagggtatataggtgaatttatatataaggtataattagttttttgaagataagaattgatagtaagtatgtaggtgtggtggtaataagaaaaagttattttttttttttttttaggtaatgattttaattttaaagagtttttggtattttagtttgtgtttgagagagaattttgtataagaatagtatattgagttttataaggtaaaatagttttttattttttggtggattttttatgttttttatatttgtaagagggagtaatgtttatagtgaaatggtggttgtatagttggtgaatagtttatagagaggatgttggagttgtggttaagtgggaaatattggtttttggggttgttaatgttgaaagagttgttgtttggttgtgttgtgtttttgtggatttaggagtttaatttaagttggtggagttggtggagtggaggtgttgtggtggtggtagatttggtgtggtttgggtattttttttttttattttttatttaaatttttttgttttaatttagttttattgttattggtttgatgtagtgtgtggggatgttaggtgagtgttgtgtttattggttgtagggtgtgtggtgtagttgttttgattattatattttagttttgttgttgttgagtgttattgattgtttggtgagttagtgggagaggattagggtttttgaggtaatttgtttggggtttaggttgtttttttttgaagtttgggttgttgggttgttttggttttggttttttttttttttttttttttttttttttgtttttttttgtgtttttttttggttgtgttgtttgtgtttttgttttttgtggtgttgtttttttgttttgtgtttttggggtttttgtagtttggttggttgtgttgtgtgtggggtttattttttgttgttggtggtgagtggttggtgggtaggtttatttgttgatgaggttttttttgggttttaggaaaaggggggaatttggagtaggttgtttagtttggtttggtttttatgttgtggtgtatatttttggggtttggtttgttttggttgttttggagggttagtttttttagaattggttgtgtttggtgtgttaggggaagaagaattgggaatgggatgattaaatttagaggaattgttttttgattgttatattattattttgttttttttaattttagatatttaaaaatgttgggtgggaggaaaggggtgttttttgttgttgggataattaggttggaatgtattggtaaattgaagttgattttgtggattgattttttgttttttagatttgtgaggtttgttttttagtttaattttagaattgaagtttattaatttgaagttaaagagtgaaatgattttttagtagtttaaagtttgtaagatttttatatattgtttaattttttttattgttggttttttgttttttgtttttaagtaaatttgtgtaattagttgtggtattttggtaattataaggataagtttttatgattttgtggagattttttaaaaatgtattagtttaagggtgtgagtagggagggatttattatagaatagtgaaagatttattttatgtttttaggtgttaatatataatttttttttgagaaattatttggagagagaagattgttaggtgtaatttgttggtaattttttttaattatttttatatgtttttattatttgttatggttttttaaagatagttataggaaggttatgaagaatttttgtgttttttttaaagtttttaaaaagttattttttatttaatggggttgttagttttatttaaaaagttttatagatataaattatagaaggtttaattttggtgttttgttgttgtgagaagatttggtgtgttaggaaatttttttttttatattttttgtaaaatttaatttttgataagagttgtaaattttggttggttgtattggttgggtttgaatgggtaatgtttttttaaagtggaaagggaattaaagatgtgtaagtttttttttgatttagttgaggtttttttttttaggaattagttttgatttgtttttttttaaggaggattttaaattggatttgtttttttttttatttttattataagttgttttagagtgtgtgtatgaaagtgaaagttggatagatttaggttgataagtttattagttgtgtggtgtgtgtttttttttttttttttttttggtttgtttttagtttttggtattagatgtatggagttttttgttaggttgtttttgtaaagttgatgttgttaattttaatatgaagtaaatttttttagtatttgtgtgtgttttttatagagataaatatgttgattttagtaaaaaaaaaaaaaaaaaaagatattattataatgttagaaaatagagttttatttagttatattttattatgttatttttataagatggaattaaatattagaagttattagaagtttgatgatttatatttgagatttataaagtatttttattatttatttttttttaaattagtttttattttttatttatagtgtggtattttaattttttaaattaataagttattataaagaattattgtagatgatagtatttttaagtagaaaagtttgtatgtggtttgggggaaatttttagtaatagataattttattttaatggtgaagataatatttttttttttttattttgtattattgttgtaaataagtatttttttaataagtttttaaattgatagaagtaagatgtatggtgaagatattagtattaaaaggagatgtttgagggattttattatgatggatatgttttgaagtttagtgtatgtattatgatatattttgtattaaaatttaagttagaatagtaggttttgtagttttattttattttgaagttttaaattgattatggattattatgatttttttagttgattgttgtatgtggatttagtgtattaaatatatttgtaaaattttgtatatataaaattgatgagtaatttatttgtaatatttgattataggagtgattttttgtgtttaaagtggggattagattttttttttttaaaaaaggatttgttttgatttttgtatattgttaggttaaaaatatatttttgaaaatggtaatagtgtgaatttttggtttgatttttttattgagaaaatgaggagtatgagtagttattaagtgtagtttttattatttttaggttgttttaatatatttgatagtgttttttaatataaaagggatattgaaatttaagtttttttggagtttgtggtatttgtttatgtgtttttgtatatattttttaaaatgtggttgttatatttaattttttgatgggtttttagatttgtgtttttgtgtattgttgttttttttgttttagttattatttaaatattttatattaaatttaatgttagatatagatttttgtataaatattatgtttttaagttatattttaaaaatttaaataggttttaattgtaattgaaaggtaaaattatatatttagtatttatttattttttaataatttttggtagatataaatgaattttaagttgtttttttgggaaattataaatagtaagatagtttatttttttttatttaattaagattgggaagggaagaggggttttgattagttttttaatggaggtataaatttgagaatttatttttagggagatgatgttatatgtttagtttatattagaattaggtttgaaagagtagaataagttatattgttagttttattgagtaaggtatttagatgaaaaaatatgtataattgaaggatttatattttttgatgtttatattatataatttgggggttaaaatgaaataggaagattttatttatttttaaaaatggatattgagtagatgtgtatgtatttttttttttgtttttattttttttgtgtagtttttaatgatgtagaataaggttatataaatttttagtatttttaattatgtttaagggttagataaaattatgtgtgtttaaagggagttatgattaattatttatattttattgtgaatggggtgtgggtgtttagaattaatttgtgtttttttttgttggtggtggtggtttattgaggaataattaggagaatttgtgttttaattttagagaaaaggaagagatattagtgggtatgaaatgattttttttttttttttttttatttaaaaaaatattaagtaatgataataaaggtagttgttaataataataaatttttagttgtgatttttattttgatgtttaggatttttgttgtgattgtggttttgttgagtgttaattgttttattaattagataaaatagtttgggtgaattagtaagaattttttttgtatgtagagttttttagttttattttttgagtttaggtagttgtttttgatattagtttttttggtattttttggtagatgataggttagaaggtattgtttttgtgtggtttgttgtttggtttttagttgagatagaattttatgtttttggtattggggtagttgtgaaattataaattttagtttagttttgagtatgtgaaggtttgtagttgattgtagggaggtgtttggttaagtgaggatggaaatttgtattttttttttaaaattgtgtttttgaaagtatttattatgatttattaaaagtggttggtagtgttaagtgaaattttttttttgtttttttttgttttttagaatttttaagtgattaggaatagatgatttttaattgagttttgttgtgtggagtttaggttggtgttagtgagtgtagtgtgttgatttaagtggtggtggtttaaggatgtgttgatttgtatatttggtaaagtttttattaaatgtattagatttttgtggaagtggttgtagtttggagagtgaaatagttattttttaagttttgattggtttagttgaaatttatatttgtattgaatttggtaaaatatggatgggtttgtttgagattttaggaaatttagagtaagttatttttatgtagttgattattttttttgaaaggatggatattatttattttattgtaattttgtttaatgggtagttttgagtttagttttagtgttaaaggattgattttttttatttgttggagatttattggggatgagtgggggaggggaggtgaaggtattttggaggaggttaagtgggggaggaggaggagtagtagaaaattattagttaagtaggggagggagttggaagtttggaaatatattaggatgttttaagtaatttttttttaagttttagaatttagtttttggaaaatagttttataaggtgttttgggaaggagtttttgggtgggttgtggaggtgatgttaagagttatagttattttatgaattaaattgatggttaaggtatgttgggatagtttagtgtaagttgaatggtgtgtggatggggtaatttttaaagagaggtgggtaattattggtggtatttattagtatattttgtatgtaatagtagtttggaagttgaagaaaaattttttaaattttagtaaatgtttggttagtttgagagagattttagggataattttgaaggttgttgtttgttttaattttgtagagatgaataagagtgtgaattttggtgtgggtgtgtttagaattatttatgattttagatttatgttgttgaaatttattaattttttgtgattttatgtggagagaagaatttgttttgtttttttatttgttaaatgttgattgagaaaaggggtttaggagatgattttttttagaaagaatgttattttattaatttggttgagttattaatttgttttttgaaaggttaataatgttttttttttttagttgtattgtgtggagattaattgttttattttaggtagttttttgtttagggtttaggaatttttgttttaaggtttttttggggtttagaagttgtgttgtgtatgttttttttaagaattttatttgtttgtttttaagtatatatggtgttagaaatttagtttagtttgagttttgggatgagagaagagttaaataaagagattttaattgtttttttggttttttgttttgttgttttgtagtttgttaattttttagttagatagttttttaagtttttgtgttgtgagtgaaagagaatttttttattttatttttttattgattgaagtagaaaaattgaattgaatttatgttttttgttttgatttttgttagaggaaaatagaaaattattttgtaggttttttttagtttttggatggtgagtgtagtttttgggaggttatatttagttttttattgtgaattttttgttatttaagtttgtttgggattagggttttggatggttttggttgtttgtaagtatgtgaaagaagaggtgaatttaattgttggtttagaggatagtgattagataatttgaggattattaaataaggggtggtggtgtttttgttttatggggttggtgtggggtggggggtaggtagtaagattttttaggtttttggatgtaaagagtgagaaagaaagtgtagtttttggtagtttgtttataaatgtagttttttggaagatgaaatttgtagttttaggttgtttttttttatatttatgttttaattttttgggttttttttgaaatgaataaaattgtggaaatgaatgaatgagaatattattttaattgttttaaatttattgttaagttattttttttgttatttgttagaggtttaatttgtgttttgtgtttatattttagaaaattgtaaggatgttttttttgtatttgtttgttttgttggtagtgtgtggaaatgataattgtatagttattg

SEQ ID NO: 235 - DNA, 22692 bp, Artificial Sequence
  chemically treated genomic DNA (Homo sapiens)
taggtaattggtgattaaaaatatttttaggtagtattgagtgttaggaaaagggggttttggggaggtgagtgaatatttatgtttttaattgaaagtttttatatttaagttattttttttgttttttttaaattaatttaaagggttggtttatgggttttttgggggtattagtggtttaatgtgggttttgggggtagtgagggtgggagagagttagtggttttggggttattaggtgtgtttatggtggaaagaggttgtggagttgggtaggtgagatagatgtgtttttttgttagttttaggtaggatttagtttgtagaggataaatgggtagttttggttgtgtgtggggaggagatgtgagggtgtgaggaggttgggtaattttggttatttagtgtttggatgatgttgttatgtaagatttgagattttgttgtatattatttgatttttttagtatgtgaggtaagttttgttatttttattttagagatgaggaaagttgaggtttagaatggttaggtgatttagttaagggtgtgtagataatgtgaggtagagttaagatttaagtttaaatgttttggtttttgtttatttggattatgaagttagtgtttttgaggattttttattattgttttttaaaataaatttttttattggtagttggtaggagaaaattttgttgttttgggaatggaatggtatttggggttttagttagttatttaagttttggtgtgagtggtttattttgttttttttagggttgggaatttttgaaggagaggaggagggagggtaagggtttaggatagttgtgggttttaggttaggtattattgggttttgggagtttggagtatttatgaagttaggtagggttggttttgattttatttattttttatttgggaggtttgtggtttttgttttggaggagtttggggtaggtttttatggtgtttttgttattttggttttttttttgtattgtaggtttgtgtttgttaggtttgggttatgggtaaaatgtatgtttgtaagtgtttggagaagaagaggattaaaaagaggaaaggggagtttatggtttttaatgagaagtagatttttgagaaggttaatagttagtttgtggtgagtgagtatttgggtttagtgattggtttgtttttttgtggattggggtttttttttttttggaagggtgtggttttttaatgtggttggtttttatttttgggaaggggaatgttagtggtagtgttgagttatagaaaggttgtaagatatttttttattatatggtttattgtggttgattgtggttggttttgttttatttttagagttggttagtgtttggttttttgttgtgtatgagattgatgtttttgtttttttggattattttgtaaattttttagtggataaagaaagtttatttgggtttaggttgggagttgtgggttttatagattttttaggttggtgttattgtggtggggattttagtgttagtattttggaatggtattattaagtttgtgtgtattgtgttagttagtttaggttgggttttgttgtagtaatatatttgttttaaattttaagtagttaaatatagtagaggtttatttgttatttatttgaagtttaattagattgggttatttttttttatttaatagttgttttatttggagttttgaaagtgagtgttaggggttttatatagagattttttattgtttttattggatagatgttttttagttttatttatagtttgttagttagaattagttaatatagagataagttagttttaggggaggttgggaaatgtgaagtgtatggatatttggttagttttaatattttttgttatatattgttataaaaaataaagttgggtgtagtggtatatgtttgtagttttagttatttagaaggttgaggtaggaggattgtttgaatttaggattttgaggttgtagtgaattatgattgtgttattgtattttagtttgggtgatatagtaagattttatttttaaaattaaatatatgtatatattaaaaataatatatatataaggtaaaaatttaaatagtatagaaggatatataataaaatgaaaagtttttttttttgagtaattattttaggtatgttttatttatgtataggttttattatttttagttaatgggatttttttgtattttttatggaggaatgttttttttttatattgtagatttttttttttatttagatttttagttatatttttttttaaagttgggtattatttttttgaagagataaagtataatttatatagttagtttttatggatggaaattgttttttatttttaaattattatagggttgggtatggtggtttatgtttgtaattttagtattttgggaggttgaggtagatagattatttgagattaggagtttaagattaatttggttaatatggtaaaattttatttttattaaaaatataaaaattatttgggtatggtggtgggtgtttgtaattttagttatttgggaggttgaggtatgagaattatttgaatttgggaggtagagattgtagtgagttgagattatgttattgtattttagtttgggtgatagagtgagattttgttaaaaataaaataaaataaataaataaaattattatagattagtggtatttttagaggatggaagtttgtattttgggattttattttaggttatttttagttgttagttttgttgggggtgtaggtgtgggtagtgttatggtatgtggagatgaggtagatgaggttaattttagttattattttagttgtgggtttttttgagtttgaaatttttttttttattgttagttgttttagtagggatttttggatgttgtttatggagttttgtttttgaagggatagtgttggtgggttttgtttagggaagaggattatgtgatttataaagttgggtggtatgtttttaagggtttttagttatgatggttgtattttttttaattgtgttttatttatggttttggtagggagtttttatgatgttattttttggattttttttttggtgattatttgggtagatgtgggagaaaggggatagttgtagttattgtagtagaagtatagtttttatgagtttgtttatttttggttgttattttattttttttttttaaaaatagttgatgttgatgtattagttttatggtatagttagtttttagtttggtttatgatggttgggttttatgtgtgttatttttttatgtggagaaggattattttttggtgtaatttgttttttttgttttattatggttttgttttatagagttttgggtgtttggattttattagtagaggattagatttttttttttggtggttttttgttaagtggattagtgtattagtttatttttatattgttgattaagatataattgagattgagtaatttataaaagaaagaggtttgatggatttatggttttatgtggttggggaggttttataattatggtggaatgtgaaaggtattttttatatggtggtggtaagagaagaatgagaattaagtgaaaggggtttttttttataaaattattagattttatgagatttatttattattatgagaatagtataggagaaattgtttataatttaattattttttattgggttttttttataatatataggaattatgggagtataatttaagatgagatttgggtggggatatagtttaattatattattttgtttttggttttttttaaattttatgattttatattttaaaattaattatgtttttttaatagttttttaaaattttaatttattttagtattaatttaaaagtttatatatagtttaaagttttatttgagataaagtaagttttttttgtttatgagtttgtaaaattaaaagtaagttagttattttttagatataatgtgggtataggtattgggtaaatatagttgttttaaatgggtgaaattggttaaaataaaggggttataggttttatgtaagttagaaatttagtagggtagttaaattttaaagttttaaaatgatttttttgattttatgttttatatttagattatgttgatgttaagatgtgggtttttatggttttgggtagttttatttttgtggttttgtagggtattgttttttttttggttgtttttatgggttggtattgagtgtttgtaggttttttaggtaaatagtgtaagttgttagtggatttattattttggggtttggaggatagtggtttttttttgatagttttaataggtaatgttttagtagggattttgtgtggggtttttgattttatattttttttttgtattgttttagtagagggtttttatgagggttttgtttttgtagtaaatttttatttgagtatttaggtgtttttatatattttttgaaatttaggtggaggtttttaaattttaatttttgatttttgtgtatttgtaggtttaatattatatggaagttgttaaggtttggggtttttattatggtttgagtattgtattggttttttttagttatggatggagtagttgggatttagggtattgggtattaagttttttggttgtatatagtatggggattttggatttagtttgtgaaattattttttttttttaggtttttgggtttgtgatgggaggggttgttgtgaagatttttgatatgttttgtagatattttttttatggttttggggattaatatttagttttttgttatttatgtaaatttaggtagttagtttgaatttttttttagaaaatgggatttttttttttattgtattgttaggttgtaaattttttaaatttttatgtttttttttttttataaaattgaatgtttttaatagtatttatgttattttttgagtgttttgttgtttagaaattttttttgtgagatattttaaattattttttttaagtttaaagttttaaaaatttttagggtaggggtaaaatgttagtagtttttttgttaaaagataataagagttatttttgttttagtttttaataagttttttgtttttatttgagattattttagtttggattttattatttatattatttttagtattttgggtaaagttatttaataagtttttaggaagttttaaatttttttatatttttttattttttgagttttttaaatttttttaatttttatttgttattggttttaaagttatgtttatttttttgggtattttttttagtagtgttttatttttttggtattaatttattttattagtttgtttttatattgttgataaagatatatttgagattgggtaatttataaaagaaagaggtttaatggatttatagttttatgtggttggggaggttttataattatggtagaaggtgaaaggtattttttatatggtggtagtaagagaagaatgagaattaagtgaaatgggtttttttttataaaattattaggtttgtgagatatatttattattataagagtagtatgggagaaattgtttttatgagttaattgttttttattggttttttttataatatatgggaattatgggagtataatttaagatgagatttgggtggggatatagagttaaattatattaattaggtatattttgtatgtaagagaaagtttttattaggttatgttttattttttaaagttttattgtttttttagtttatttttatttggttttgtgagaatggtttttatatttaaaagggtaagtgagttttgtttttttgattggttaagaaggtattttttagttttttttagttgatgtatatatgtgtttttgtggaggaagtatagatgttattttgttggatttattgggaggttggggtgttagtttgttttaatttgttttggtttttttattttgatttattgaaagggaggagtaggtgtgagttttttattagttaaggaggttgtaggtagggttattgtagaggttatttgggtgtaggggagtagggtgaggtttttttgtttttttatattttagtttttaggattttgaggagggaagtggaagtgagtggttattgttataatttttttatggtattgtttttgtgtttttaggttaatttggtttatgtttatgagattaaggatgtattgtgtttggttttgattattatgaatgggggtgatttgaagttttatatttataatatgggtaattttggttttgaggaggagtgggttttgttttatgtggtagagattttttgtggtttagaagatttttattgtgagaatattgtttattggtgagtggaaggtattaaggatttttaagtttaagtttgagggggtggggttagtttttttatatttttgggtaggtggttgttattgttttgggaattagttttggttagtattaggggaggatgtagagttagatagattttttattttaggaagttggggtttttggtattgaggaagtgaggtgggttattttttggttagtgttttttagtttttaaagtttagggaagttaagtaagtgaaatgatgtttttgaaattgattgtttttttaagttaaggaggatgggttgtgattattgttttttttagttgtttttattttagtagttagggaagttgggagggggtttggtggttgttatttgggattagttttgggaagatttgggttgggttattgtttataagtagaattggagtggtttatggttttattttatgttgtttttagtttgttttggtttttattttttttttttatttattttaattttatagggatttggatattgtagggttaggggtttagattttatttataatgagtagtgttttttagattttttttttagtttttttgaaagaattttgaaaaatttttgtgatgttgtattttaagtagatatttgaaatattttattatattgaaatagtggtaatttttgatatattgaaattgaatagttatattatattttttaggggatttagtggaatttttagttgttgtagttaattgatttttatttgtatttatttaaaaaatgtatagaaagttttttagtgatgaggaattttttattattttttttattttttttatttttttagaatgttaataatatatttttttgtttgaaagttttttattgattagtgtatatttttgaaataaatatatagatatatataagagtttttgaagttttttttgattgtaagtttttaagtgttaaaataatttttttggttggttgtggtggtttatatttgtaattttagtattttgggaggttggggtaggtggattatttgaggttagtggtttgagattagtttggttaatgtggtgaaattttgtttttattaaaaatataaaaagtagttggatgtggtggtatgtgtttgtagttttagatatttgggaggttgaggttaaagaattgttttaatttggaggttgtagtgagttaagattattattgtattttagtttgggtaatagagtgagattttgttttaaaataaaataaaataattttttttgttgagttgttattgtaattagtagtagattttatttttaattagttttttggaagtaggggttttgatatttggagtgggttgttatagttatatttgggaggggaggaggttgttttttttttgtaatttgggagaagagttattgagaaagggtagatgggagggagattttaaaagatgttaggatagagtattttgatgtgaagaaatttaaattttttaaattgtggataggagggaattttttgtttggttttggtagattttgatatgtagtttagtttgaagatttttgtagtggagtttattttgggattaagaaggttttgaaaataagaaagaatggttttgatgatatgtttttttttttatattatttttttatttatgtttttgttttgtttttatttaaatgaaaagagttaaaattttttttaagggttgaataaagaattttttatgtgattgttttttatttaaaaagaaaaaagaaagttttttaagttttagtttgtttttttttgggggaaagagaattatagtgttttttttttggttgtgattatttattatggtttttttttgggttttgttttggttagtgtttattagtgagttgttatgttagtttggtggtagttggtttgttgagatgatggttgttgtttttatttggaattgttaatatattaaaagaatgttatttaaataatagtaataaaagtattttatgataaataaggatatataaatattaattattatttgatgaggtttattggttggatttgggtatattaattattttgtatgaggatagttgttattagttaaataaataaagttgggtggttgagaattggagtttttatttagattttgtgtattgtttgttttatggtttaattgagttgtatatattttttttttggttgtttttttatttatagagaagatttttttttataaaagtagtttttttgttggttttttttttattttgggaatgtagaggtttttttatttgtgagtaagattttgttattaagagaggagatattagggataggataaggtagttatatttatgttatgttttgtagttgtttttttttttaggttgtagtgtagttggtgttgggggatatgttagttttttgtaggttttattttaaagggggttttttttttgtgtttttatttttttttttttgattttttttttttaattgtatagttttttttattttaggttttgttttgtttttagggttttttgagatttgtagggtttttttagttttggagtatttttagatttgtagttattgatgtgtgaataggggttatgattggtttttttttaatttttttagttattttttaggattgggaaatgtttgtggtaaatggtagtgttgttttaaattattggaaggagaaaaattagttgaagattattttgatttaaattagatagtttgagttaggaggtgggaaggaaatatattgtggttatttaggtttgattagtttgaggggttgatttagatgttagtgtattttatttgtttagaatgtttatattttgatgtttgttgtttttttttttagagatttgaaatttgaaaatattttgttagatgattatggtaagtttttttttatttggtagttgaggtgagtattgtaattttaagaaagtaaagggttttttagggatttttagagagggttggggaagttgattatgggttttatttttattgtttagtgttgggtatttggggaagggggaaagttgtgagtgtgaatagagttttgtttggtgaataggtagtgtttagagagattttgaaatttagagtttttgaaattttttttgattataaggttttaagtgttaaaataatttttggttgggtgtggtttttatagtgtattgaataaggagtttagaattttagagatgttgggtaaatatttaatttttattaagttttttattttttattttgtttgtaaaatggaaataaagtgttttgttttgttttgtttatttagaaggaagagggtggtggagaggtttttatatgatagtttgagagggaattgtttgttagtttagttagttgtaaatgttttaggtattatgtttgtgtattattattattatttttttttggttgtggatattgaataataagaataattatagtattttttatagttgtttagttttatatttggaaaatagtttttatattttttttttttttttttgagatagagttttatttgtttaggttagagtgtaatggtgtgattttggtttattgtaatttttgttttttaggtttaagtgatttttttgttttagttttttaagtagttgggattataggtgtatgttattatatttggttagtttttgtatttttttttttttttgagatgtagttttatttttgttgtttaggttggagtgtagtggtgtaattttaatttagtgtaatttttattttttaagtttaagtgattttgttgttttagttttttaagtagttgagattataggtatgtgttattatgtttggttaatttttgtatttttggtagaaatggggttttgttatgttgattaggttggttttagatttttgattttaagtgatttgttttttttggtttttttatgtgttgggattataggtatgagttattggtttttatatttttgatttgattagatttttttatttgtatagagaagggtaaggtagtatttttgtgtttatttaatagatgataaaattgagttttaggggagttattttgttaaagttatttagtagtattagtggggagttgagggtagaaattgggtttttttttattaggttttagaatttggtagtttttagtagagggaggggagaaattgggttgttgatgatttgaagagaggtttgtatgggatattgttttgtggaggggtggttggagggtttaggtttgttgtttttttttggatgtgtttggtgttttttttggtttaagaattaagtttatgttgtttttttgttattttgattgttagtttttattgagttagggagtttatatggttttagtttggtggggttttgatattggtttttgttgatatttaggttggagggatgggggtggggttttggtgtttataggtagggaagggaaggggatgtgtttttttttgtggggtaagttgtggttgtgattttgtttaggtgggttgtgggagggataaagattaaagtggagttttagtttagtgttttttgttttgggggtttagttttgggttgtgagttgggatttatttttaggttttgttaggttagattagatgttttttttttttgtttttttaaagtgaaaaataattaatttttagagattaataaggtaggttggggagttgttttttaaattgttttataattttttttttttaagtaaattgttgtataatgttagaagaattttatattttttttatgaagtaattttagaattaagttaagattttttgattttagtgttttaggaagtttatttagtttttgattaggtaggttggttaatgtttagttgggtttaggtattttattgtatttttatgttttatttttgaagagtgggtatttttttgtgtttttttatatttgtatttttttaaggtttttgtggttattttgagatggtagattggggtttttgttgtttttggatagatgagaatgttgagagtttgtatgttttgtttaagggtatatagtaaggttgggtgtttatgtggttgttttagggatttattgattttgttgttttttttaggttatattaggattttagatttgggtttggttgtgaagatttttgagggagatttgatttgtggttgggtgggtattgttggttatatgggtgagtgttgggttgtttgtgttaatgtattttgagatttattatttgtttattgttggttgagtttttagagtttgtttgtagagttttttgtttttttatgtattgttgattatatatagagttatagtttttgtagggttgttggggggtggttttagttagggggagggggagtataggggttttagatgtgatgattgttttgagttttttgtatttttaggtttttagttttatttgtgtttaaagttaagttatttttaggggttggggtttggtatatagtgttgttaggggaggttatattgaagtaggggtttgggaggagaggtttttgagaggaaggaggtaatttataagagtttgtaaatgagaggtgtgtatagttgttgtgttattaagtatgattttagtagagagtagttttgggtttttgttatttttttttagtttgttttgagattagtgttttgggggttgtagggaagagatttagagttaagttttgtgttttagaattttttgtttaattgggggtatgttttgggtttttttttgtgtattttatatatttatttttttttttttgagaggtgtgtgtttggggagtaggtatgttgttgttttttagttaggttggtattgatagtagttgtataggaggtgtgttttgtttttggtgttagagggttttttttagattgtatgatatttggtaatttgtggagtgtgtgtttgtgtgtatgtgagtgtgtgtgtgtttatatgaatgttgattgatgattgataggtaggtgggtgggtgggtggatggatggttggatggatgatggatgatggatgggtggatgatagatttgtttatttgtgtgtgtatttgtttgggtttttttttgtagagtgttttatgtatttgtttgttttggtttttgtgtgtaaattagtatatgtgtggatgtatttttttttagatatatgtgttgatgttgtagaattattttttttgtatttttatggtaaatttgtaatttggtttattaaagtggtatagaagatatagtaagagattgtttgaattatagataaatttaagattatttttaatttgggtagatatatttttatttattgaaataaatatattgatagtatttgttttgtgttaggtgttatattgttatggtagtgaataaagtagtttatgttttaggtgaggggatattaagagtgtaggatatttttatttatggtggttagagttttaaagttatagttaaagttttttgggggtatagaggagagttattagggtaagttttttggagggggtggtatttatagtagttggtggggtaagagttggtggtggttatgaaattttaggttttttgtgagtagtgttattagttgttttttttttttttatttttttttttttttttttgtttttagttttagaggttttgaataattagaggtatggtttgagttttgattattggggttttggttgttttatttatgagatgattgagggttagttgttgttttgtggttgtaaggagaaggtgaagtgggaggaggtggattgttgggttttggagatggaggaggtgtatttttataagttttttgaggaggttaagtttatttgtaagatggtgagtttttggtggttagatgttatttttaagttggtggtttttttttttgggtttggttttagtttgtttttagaatagtaaataggttgaagggataggggtttgagtatgggggtgggggttgtagtttattaagttagagttgagggtattttttgttgtggattggggtggttagtggagatttttaggagaaagtttgggtggggtagggatatttaggaattaagggaagaggggtgaggggaatagtgtggaatatttttatatttagtttgtgggggggtttatatagggtggagaagagatggtttgagttggtgttttagatataaagtaattttgggttaagttttggtttttgtttgtgggttttttgttttttttatttttggattttaaggtgttggtttaagatgaagggttatagggggtgggggtgatgattttagtttttgaatattttataataaagttttttattattagatggattgttggttatgttagtttggtttttgtatgatagggtttagggatagtgaggttagatttatttaaaagttgggtgggtggggttagatggggggattggaagttagataaggagtgataggagttattggaagtgggggatatgggagtggagtttgtttgtgtatttttgttattgggttgttttatgttggtttttaggtttttttttgggaattaggattagtggttggttttgtggggagatggttattttttgttgttgtttggtttttagtttttaagtttagtttatgtttttttggggtttttttttttatggtttttagtatagttgtgttggtatttttattgtaagtagttgttttttaatgttagttttatagggataggaggggttggagtatttagttttataattgttagtttatagatttttttttttttttttggagttatagatgtattttgtattttatgtatttggagttatagatgggtaaattgagtttgggaggggggagttatattttttatttttttatatttgtaggtatttttggggtagatttagtgtgtgtattgataatttaggtaatttttggagtttaggaagtagtagttttgggagttgattaaaagttgtaatgtttttgtttaggaagatttgagatttgtgttgtaagtggttttaggagggtttggtttggttttttattttagaggttttttttttgtagttagatatttttgtttggtttttttttgttattaattttatttttatattatagagttgtgggaagaagttttgtgtgtatagtagatttatattttaattttatagttgttggtttgttatgtagttggggttttagagaaagttatatggttattgtagttagggttagggtggggggattggaggagtagtgtagtattggttgggtaaatggaaatgtgggtgtgagttatatttggttgttttattgggagatatttgttaggtgtgataaaatgagataagggaaagaagaaggggttagatagttgtgggtagagtattattaaatgttttaggttagggttaggtaattagagaagtaggttttgagagattttagtagggatatgggatgtattaagaggatgatgaggtggagagggttttagttttatttttagattttagatatttattttggtttttggttttggagttgggattttttgttgtagtttggattagggtgttgttgtttttttgttgttttttggtggatattgagagaaagtttgttgtttttggaggatttgttttgtgggtataaaattattgttttttggaagtttttggttttgttgtggttttttttataaatgatttttggttttgggagtttagttttaggttttttttatgtttttgattgtagtatttttggtatttaggtttattttgttttttttagttggtggtagtttaggatattgtagagtttgatttgttaggagattttgtaggttttgggtttatagggttatttttaggttttggtggttttagttttgtttgtttaagagggtttttttataattagtgaggaagttagtttttggtttttaggtttgttttttattttattttagtagttgtagaatttatttttttttttttggagtttagaaatttatatattttattattttgttttttgagtttagtttatgggtttagattttagtttttattttttttaaatttttgtttagttttagtattgggttttagtttttttttagtttttttttgttttttagttgttttggttttatttgtttttttagtttatttgtattttttttttaggaagtttgttttgtttgttttatttattttagtttatatttttttttttttttattttttttggtgtttatttgatagtatgattgtaaattttttatttgatgatgtggttgtaaattgttgattggatgttagggttttaaatggtagtatataggtgggtgtttaatttgtatatggttttttaaaagaagtaaatggtaggtttattgttaagatttagaaatgaggagattttatgtaataatttggattttttggttttttttgaaaagtagaagttttaggttttggttgttgttttatttggtaggagttgatatatagtttggtttggtttatttagtttattttttgttttttttatttttgtttgtgttatttttttggttagttgttgtagtttttgtagaaggagatttgtttttgagggattgtttagaatagtgtagtatttgggtttagtttaatttagtgttttgagtttttgttgaatagtgaagtttttagagagagaagtagaggtatgagtgttagattttgagttgttagtttggtggtttgtgggggtgttaaggggtaatattgagtgattgagtgttttgttttgtttttttaagggtggaatttggtgttggttttgatgttatttttgatttttttgtttggggggtagttttttttagattttgagttttaagaggttagtttggttgtttattttttttggtgtttttagttggtgtagtgtttgttttataaggattagtaggaagtgtatatgggatgaatatgagtaaagtgtatagggtattgggaaaagataaggttgggtttttattttaagtagtttgtttttttggattttagttttaaagtagatatttagtagatattaattgtgtatagttgtagtgtttagtaaggtagaggagaagagagaattatgaggttggggtattgggagtgtaggttaggggttggggttttgtggttgtgtggttggttatggttagttaaggttttttgtgtaggtttagttttttggttttatttatagttttattttgttttatttgggtgtttgtttttaaagatttttttttttttagtaatttttttgttttgtggttttgatgaagatatttttttattttaattatttttggttttttttatttttagatgaaaattttgttatttgatttggtttttaggattttttattatttttttttgattagttttttttttttgatttatttttgtattttttttttgttttttaagttaaatgtgttttgggtgttttttagatttattttgtatgttttgttattttgttttgttggtgtagttttttttatttgtatatttttttttttatttatattttgaaagtttatttgttttgtaagatttaatttaaatattttttttttgtgtagttttttgatttttagttggtagttagttatgttttttgtttttggggtgtttgatttgtattattttgatgtgttttttgagtatgattagttttttatgagtttgagtatttttagaggttaagtgttttggtggtgttttttttgttaggaaggggtttgtatttaggaggtataattttgtaaattagttgagtatgtgtatgagatagagttattgatgtagtttttgttttttgttgtttattttatatagaagaggtgatagtgatttgatatttattaatgagtgtttattataatttaggaatgaggtttgtaattttgagagaaataagatttttgtttttttgttttattaggtatttagttaggttgtgagtgtgtgagtatagatgtatgttaagatttagaggtagttttgaagtaagatttttgtagggtggggtagtgtgttttgggtttttaggtatggtgtagatattgtggaggtaggaggtttggataggaggagaggtttaggggatgtggttttatggggttttttgttttagttgtttatgaaagatgtgaagtagaggttgggttgttaggaggagggggttgtagaggttaagagatattttttttttaggaatatgaattttaagtgtttagaagttgggatgttggattttttttttgttttagatgtgagtagttttttttagtttttagtagttttttttatagggtatttagggttgtttttgagtgttgttttatagtgagttggtgtagagtgtggggtatattgtgtttttgtggggattagggtttttttttggttattttttatttaagttgtagatgaattttatgttaggtagtgtagaagaggtgtgggttagggagtttatattggttgtttagagatttgggtatttttttaggtttgggggttttggatagattttttttaagtgttagttttttttttgtttagtgaaattagtaatatttatgttttttatttgtttgggagatttgagggtgaaatgagaattgaatggggaatgtttttaagagtattgatggttattatatttagtttattttgattagtatgtatgtattgagtattattgttgatgttaggttttgggttaggtagaaatataagaggttttttttttagtagtttatattgtagggagttgtatttttttaggaggtttttaggttttttagttggtgtgtgaggtaagattttagttgaggtagaattgtttttgaaagttttttatatggtttataaattatgagtttttagttggattagaggtttaagagatgtagattaggtagaggttgggtgatttgtgtgggatatgtgttgtgattttggggtttgttttgtttaaagttagggagttagaagttaggaaggtttgttgtgttttggtttttgttatgtttttgtggatgattttttgttggtagggggattgggttggggattatggaggttgtgggagtagtagtgtgttgtaggtgaatgattgtatttttagagagtttatgtgtatttttttttttaattttgtgtttaatggttttgtgttggtagtttatagtagatttggtggtagtatttgtatagtagtaatttgtaaatgttataaattagggtttttgtgttttttttttttagaattagtggttattatttattagtattgttttgagtggaggtaggtggggattgtttttggaattttggtattttttatatatggggattttttggttttttgggatagaaggtggtttgggaagttgttaggtgtggattagtgtttatggtaattatattatagattttgtttggttagggatggtattagtgtgatgggtaattagggaatgttttttggagaaatatgggggttattgagaatataaagagtaggttgggtatggtggtttatgtttataattttagtatttgggaaggttgaggtagttgggttaggagtttgagattagtttgattaatgtggtgaaattttatttttattaaaatataaaattaattaggtttgggggtatatatttataattttagttatttgggaggttgaggtaggagaattatttgaatttaggaggtagaggttgtagtgagttgagattgtattattgtattttagtttgggtgatggagtgagattgtattttaaaaaataaaaagtgaaagttattgaatgttgtaaatttaatttgtagatgagtttgagtaggtagggggaggatggtaattatagtattgtttttgattttggttgtttggtgaattgtttggggagtatgaataatatttgttttggatgtagtttttagggagtttggggtaagatttgggttttaggagttttgaaatttttttagttgattttagtgtagagttagggttgagagttattattatgggaagtgttatatgtaaggagtgtgttgtttgttgtttgtttttagtgttaagggttttgggagtggttattttttggtgttttaggaaattatatagtgttgagtgtatgaatattatggttgtgttattgggttgatgtttgaaattggagaggatgtgggtatttagattgggggtgtggtaaaggtttggaatttgggtggttatttttgtggtttttgggttatttattgttatggtgatgggttgagattagttattgtattggagttatttttttattttttagtatattttaggttttgtgttaggttttaagggagattttatggtatataaaatagttggttgtttttagtttgaagaggagtaggggtgttagtaaaattttttaaatagaagtagaaatatgagttataagagaagagaataggtagtttttgggaagatgggagagtagtggggtttttgtgtgtgtatttaggtatggttggagaaaagtgttttaggttttggaagtagtatgtggaaggaggtggttttgagggttagagtgattaattgttttgttttgtttgggattgttttgtttttagtattgaaagttttgtgttttggggagatagggatagttggttattttgggagtgattttggttattttgaattagggtattaggaggatgaggtagtagagttttgtaaagtgtatagtttgataaggtgtatagagtagtttattggtgtttttttgttttagttgtgtattttgtggtttagggtttttgtttttggtatttgaggttttaggttagtaaaggttgtaggttttggagtgtgaagttgttgtgagttggggattttgttttttttttattggttttttttaggttgtatgttaatttttagttatttttgttagttttttatagttattttgttttttatagttttttttgttagttttttatagttttttttgttagtttttttagttgtttttgttagttttttatagttatttttgttagttttttattattgtttttgttagttttttattgttgtttttgttagttttttatagttatttatgttagttttttatagttattttatttttatattattgttggggttgttgttatatttttaaattatgagtattgtgagtgatattattttttttatttttattgattttttttttaaaataaaaattaatgtattttaaaaggaaatttttttaaggaaataatagttatgaaagaggggtttgggtgtgttaggtaattttttgttttattatagatttttaaaatatgtttattttttaatatttttttgtaagttatttagggttagttttgtgagtttgatttggtattttttagggtattttgggtttttatatttggtttagtgttttttgttgttattttaaaattttaaatgtggaatatggattttgtgtttttattttgtgttgagtatgtgaatgatgtggttttgtttttagttaaaagtttgttgagttttatggtggtgtgtattttgggttttgggaattagagaagggttgtagttttgtaattggatatttttgtttgtatttttgtttttgtttatgtgtatttgggtttatggtttgttttgttggggatagtatggttttgagttttgagttggagattagagtagattggaggggagagttttagaaagtgttgagttttgagattattgttagaatttttttggtatggtggagtttatgttgagttggtgtattgatttataatttttgtattagttaaatgttaggagattataagtaggaggtagtttttattttttagtgatagatgtgttattaggtttggggatttttttatattttatttggggttgtttttataaaggttttatttttagaggttttgggaagtttttttatattaattttgaatttttagagggtagggtttatttaggtttatttttgttttggtatagagtaggtttttagtgtatagttgagggatgagtaaggtaaaagatatgtttattataataatattagtttttagttatgggtgttaggtttggtggttagtattgatagtagttttattgtttaggtgttttgttgtttttattttgttggtaaggaaataggatataggttttaggggatatgagatttttttaaagtttttaagttttatagttgggattttagtttatgtttgtttagtatgggtaagggagtgatggtaggaatgagttttgggttgggtatttaggtgttttgagtttttgtgttattttagttagggtttttgttatggatttgagagagggttgtattgttatttggaggggttgtataaaaaaattataggttattatttgaggtggataggaagtttagttaagttattggggttgattttttttttggatttatttgtatttgagttatatattttttagttattatttatagtagttttgggggtgtgttttgggaagatttttttttgttttttaaaattttaaggtttggtttggggttattggagttgtaggtgggatatatgtgtgattggttttttgtttttggtagttttgtgttgtgtattgtaaggatgtgttggatattgagtagttttttattgtgaagggtgttaatttggattatatagatgatgatttttattttaagttttttatgggttttgtgtttattttatggtaaaatgaggtgagtagggtagattatttgttttggtttgggtgggagggagggattgatgggtggaaggaggtgttgggaatatgagtttggtggtaggaggttgagtgtatggtttttgttttttttatgaaggtagtatataaaagttgttagtggttaagtagggagttgtagttattatgggttagttattgatggggagttttgtttagtttttgagatttggagggtgtgtggtttaggggtaggtgaggttagggg

SEQ ID NO: 236 - DNA, 22692 bp, Artificial Sequence
  chemically treated genomic DNA (Homo sapiens)
tttttggttttatttgtttttgagttatatgttttttaggttttaggggttgggtgaggttttttgttaatgattggtttgtggtggttatagttttttatttggttattgatagtttttgtgtgttgtttttatggagaaaatagaaattatgtgtttagttttttgttgttaaatttatatttttgatgtttttttttatttgttagttttttttttttatttagattaaagtaagtggtttgttttgtttattttgttttgttatgggatggatatagagtttgtggagaatttggagtagaagttgttgtttgtgtggtttagattgatgttttttatagtggagaattgtttgatgtttagtatgtttttatagtatatagtgtggggttgttaggggtagagggttggttatatatatgttttgtttgtggttttagtggttttgagttaggttttggggttttggggagtagaagggagtttttttaggatatatttttagaattgttatgggtagtggttggagggtgtgtggtttagatgtaggtgagtttaggggaggggttggttttagtggtttggttgggttttttgtttattttagatgatggtttgtggtttttttgtgtgatttttttagatgatagtgtagtttttttttagatttatgatggggattttggttggggtgatataggagtttggggtatttgggtgtttagtttagggtttatttttgttattatttttttatttatattggatagatgtgggttagagttttagttgtggggtttaggaattttggggaagttttatattttttgaggtttatgttttgtttttttattggtaaaatggggataatgaggtatttgggtgatggggttgttgttagtgttggttattgagtttggtgtttgtaattgggagttggtattattatggtaggtatattttttgttttatttgttttttagttgtgtattgggggtttgttttatgttagggtagagatgaatttgggtggattttgttttttaagagtttaaggttggtgtggggaggttttttagagtttttggagatgaggtttttatagagatagttttaggtggggtgtgaagggatttttagatttggtgatatatttgttattggagggtagaggttattttttgtttatagttttttgatatttggttaatatgaaggttgtgaattagtgtattggtttagtatgggttttgttatgttaggaaggttttagtaatggttttagggtttggtattttttgggatttttttttttagtttgttttggtttttagtttaaggtttaaggttatgttgtttttagtaaagtaaattatgggtttaagtgtatgtggatggaagtaggggtgtgggtaggggtgtttagttgtagagttgtgatttttttttagtttttaaagtttggggtgtatgttattgtggaatttagtggatttttagttggaagtaagattatattatttatatgtttagtgtagaatgaaaatgtagggtttatgttttatatttagaattttaagatggtaatagagggtattgagttaggtgtggggatttagggtgttttagggggtgttaggttaagtttatgaagttggttttgggtggtttgtagaggaatgttaagaaatgagtgtattttaaaaatttgtaatggaatagaaagttatttggtatatttaaattttttttttatggttattatttttttggaaaggtttttttttaaaatatattgatttttattttaaaaaaagagttaatggaagtgaaaaagatgatgttatttatagtgtttgtggtttaggaatgtggtagtagttttgatagtggtgtggggatgggatgattgtggggggttggtatggatgattgtggggggttggtagggatgatggtggggggttggtagggatgatggtggggggttggtagggatgattgtggggggttggtagggatgattgggggggttggtagggaagattgtggggggttggtagggaagattgtggggggtgggatgattgtggggggttggtagggatgattgggggttggtgtgtagtttggggagggttagtggggaaaaggtaaagtttttagtttatagtggttttgtattttagggtttgtaatttttgttgatttgaggttttggatgttaggaatagaggttttgggttatagggtatatggttgaggtaggagggtattggtgggttgttttgtgtattttgttaggttgtgtgttttgtggggttttgttattttatttttttaatgttttgatttgaagtggttagggttatttttagggtgattaattgtttttgtttttttaggatataggatttttagtgttaaaagtaggatagttttaggtaaagtaggatagttggttgttttgatttttagagttgtttttttttatatgttgtttttagggtttggagtgtttttttttagttatgtttgggtgtatgtatggaggttttgttatttttttatttttttggaggttgtttgttttttttttttgtgatttgtatttttatttttatttaaggggttttgttgatatttttgtttttttttagattggaaataattaattgttttgtgtgttatgggattttttttggggtttggtatgggatttggagtgtgttggaaggtagaggaatagttttaatgtgatgattaattttagtttgttattatagtaataggtagtttagaggttataaggatggttatttgggttttaaatttttgttatatttttagtttggatgtttatattttttttaattttggatattagtttaatggtataattgtgatgtttatgtatttaatattatgtggttttttggaatattaaggagtggttatttttaaagtttttggtattaaaaataaataataaataatatattttttgtatgtggtattttttataatagtgatttttaattttggttttatgttagaattagttggggaggttttaaaatttttgaagtttgagttttattttagattttttggggattgtatttaaggtgagtgttgtttatgttttttaggtggtttgttaggtagttagggttgagagtaatgttgtgattattattttttttttgtttgtttaagtttatttgtagattgagtttgtagtatttagtgatttttattttttattttttgagatgtagttttgttttgttgtttaggttggagtgtagtggtataattttagtttattgtaatttttgttttttgggtttaagtgatttttttgttttagttttttaggtagttgggattataggtgtgtgtttttaagtttggttaattttgtattttagtagagatggggttttattatgttggttaggttggttttgaatttttaatttgattgttttagtttttttaagtgttgggattataggtatgagttattgtgtttggtttattttttatatttttagtggtttttgtgtttttttaaaaagtattttttgattatttattatattgatgttatttttggttagatggggtttgtggtgtggttgttatggatattgatttgtatttagtagttttttaagttattttttgttttagaggattagggaatttttatgtatagggggtgttagagttttaaggatggtttttatttgtttttatttagggtggtattggtaagtgataattattggttttgggagagggggatgtagaggttttgatttgtagtatttgtaaattgttgttgtgtagatgttattattagatttattgtaagttattgatgtaaagttattggatatggaattgggaagagaggtgtatatgagttttttggagatgtagttatttgtttgtagtatattgttgtttttatggtttttatagtttttggtttagtttttttgttagtaaggggttatttgtgggagtgtggtaggagttgaagtatagtaggtttttttggtttttgattttttgattttaaatagagtaggttttggaattatagtatgtattttgtatagattatttagtttttgtttggtttgtattttttgggtttttgatttagttgagagtttatgatttatagattatgtaggggatttttaaggataattttattttagttggaattttgttttatatattgattgggggatttggggattttttgggaagatgtaattttttgtaatgtgagttgttgggggaggggttttttatgtttttgtttggtttagaatttggtgttaatagtagtgtttgatgtatgtatgttggttaagatgaattgaatgtagtggttgttaatgtttttgaaagtattttttatttagtttttattttatttttaaattttttaggtaggtgggaggtatgagtgttattggttttattggatagggaggaaattgatgtttagaaggaatttgtttaggatttttagatttgggaaagtgtttaagtttttggatagttaatgtgggttttttggtttatgttttttttgtattgtttggtgtgaagtttatttgtagtttaggtgaggagtggttgggaggggattttggtttttataaagatatgatgtgttttatattttgtattagtttattgtgaggtagtatttgggggtagttttgggtattttgtgaagggagttgttgggggttgggggaggttatttatgtttggaatgaagggagggtttaatattttggtttttaagtgtttgaagtttatgtttttgaagaaggggtgttttttgatttttgtagttttttttttttggtagtttagtttttgttttgtattttttgtgagtagttgaaatagagagttttatgaagttatgttttttgggtttttttttttgtttggattttttgtttttatagtgtttgtattatgtttaggaatttaagatatgttgttttattttgtaaaggttttgttttagggttgtttttgagttttggtgtgtatttgtgtttatatatttatagtttggttagatgtttgatgggataggagagtaggaattttgttttttttaggattatagattttgtttttgggttatggtgggtatttattaatgggtgttgagttattgttattttttttgtgtagggtaagtaataaaaggtaaggattgtattaatagttttgttttgtgtatatatttagttaatttgtagagttgtattttttgggtgtaagtttttttttgatagagaaggtattattgaggtatttggtttttaggagtgtttagatttatggggggttaattatgtttagaggatgtattaaggtgatatagattgggtattttgggggtagggggtatgattggttgttagttggaggttagggagttgtatggggaagaggtatttaagttgagttttgtaggataaataggtttttaaggtgtgggtagggggaggggtatataggtagagggaattgtattagtaaagtagagtggtaggatgtgtagggtgagtttggggaatatttaaaatatgtttgatttagaaagtgggaggagggtgtagagatgggttaaggggagggggttggttagggagagatgatagaggattttgaaggttaggttaggtggtgggatttttatttggaggtagaaggagttagggatggttgaggtaggagagtgtttttattagaattatgaggtaggaaggttattaggagaggaagagtttttgggagtagatatttaggtgagatgggatgaggttatgaatgaggttagagggttagatttgtgtagggggttttgattagttatggttagttatatgattatagggttttggtttttgatttgtatttttagtgttttagttttgtgattttttttttttttttgttttattgagtgttgtagttgtatgtagttggtgtttattaagtgtttgttttgaggttaaaatttagaggagtagattgtttggggtaggggtttagttttgtttttttttaatgttttgtgtgttttgtttatatttattttatgtatattttttgttggtttttgtggggtaggtattgtattggttggggatgttggggagagtgagtagttagattggttttttggggtttagggtttggagggggttgttttttaaataaaggaattgaaggtggtattagggttagtattaggttttatttttgaaaggataaagtagagtatttagttgtttagtgttgttttttaatgtttttatggattattaggttggtggtttagggtttggtatttatgtttttgtttttttttttgggggttttattgtttaataaaggtttaaggtattgggttgggttgggtttaggtgttgtattgttttaagtagttttttagaggtaagtttttttttgtaggggttgtagtagttggttaggaaggtggtataaatgaggatgagaaaggtgaggggtgggttgggtgggttgggttgggttatgtgttagtttttgttaggtgggatggtagttagggtttggggtttttgttttttaagagaagttagaaaatttaggttattatatgaaatttttttatttttaaattttggtaatgaatttattatttattttttttgaaaaattgtgtgtaggttgaatatttgtttatatgttgttatttgaaattttggtatttagttaatagtttgtagttatattgttaggtaaagagtttgtaattatgttattaggtggatattaggagaagtgagaggaagagaaggtgtgagttgggatgggtggggtaggtagagtgggttttttggaggaggggtatagatgggttggaaggataagtgagattaagatggttgaaaggtaagagggagttggaggggggttaaggtttagtgttgggattgagtaggggtttggggaagatggaggttgaggtttgggtttatggattgggtttaggagataaagtggtgagatgtgtgaatttttgggttttagaggagggggagtgggttttgtggttgttaaggtagaatgggggatagatttgggggttagagattggtttttttattgattgtggagggatttttttaggtaggtagggttggagttattagagtttagaaatagttttgtgaatttaggatttgtgaggttttttggtaagttaggttttgtagtgttttgagttgttattagttggaggggataaggtaggtttagatgttggagatgttgtagttaagggtgtgaaggaggtttaagattagatttttaagattaaagattatttgtaagggaagttgtagtaaggttagaggtttttagaggatagtggttttgtatttatgggataggttttttgggagtagtaggtttttttttagtgtttattagggggtagtagagggatagtagtattttggtttaggttgtagtaggagattttagttttaaagttaggggttaaggtgggtgtttggggtttgggggtgggattggggttttttttgttttgttatttttttagtatgttttatatttttgttgagattttttaagatttgtttttttgattgtttggttttgatttgggatatttggtgatgttttgtttatggttgtttgattttttttttttttttttgttttgttttgttgtatttgatagatattttttaatgagatagttaagtatggtttatatttatatttttatttatttgattagtgttgtattgtttttttggtttttttattttagttttggttgtgatgattatgtggttttttttgaggttttagttgtatggtgggttaatagttgtggggttagagtgtgggtttgttgtatatataggatttttttttatagttttgtgatgtgaggatgaggttggtgataggaaggggttaagtagaggtgtttggttgtaggagaggggtttttggggtgaggagttgagttagatttttttggggttgtttgtggtgtagattttaggtttttttgagtagaagtattgtgatttttaattaatttttaggattgttgttttttaaattttgggagttgtttgggttgttaatgtatatgttgaatttgttttaaaagtgtttgtagatgtagaggggtgggaagtgtggttttttttttttaggtttggtttgtttatttgtggttttgggtatatgggatatggggtatatttgtggttttagggagaggagaggaagtttgtgggttggtaattgtggagttgggtgttttggttttttttgtttttatgaggttggtattagagggtagttgtttgtagtgggggtgttagtatagttgtgttggggattataaggaggagggttttaagggggtatgggttggatttgggggttgagagttaggtagtagtaggaagtggttatttttttataaagttagttattagttttggtttttagggaagggtttgagggttggtatggggtggtttagtggtaggggtgtatgggtggattttatttttatattttttatttttaatggtttttgttattttttatttggtttttagtttttttatttggttttatttatttagtttttgggtgggtttgattttattatttttagattttgttatgtaggagttaggttggtgtgattagtagtttatttagtggtggaaaattttgttataagatgtttaaagattgaaattgttgtttttattttttgtagttttttgttttaaattaatattttaggatttagaggtggagggagtaggaggtttatgggtaggggttggggtttggtttaaggttgttttgtgtttggggtattagtttagattattttttttttgttttgtgtggatttttttataggttggatgtgagggtgttttatattgttttttttatttttttttttttggtttttgggtgtttttgttttatttaggtttttttttggaagtttttgttgattattttagtttatagtaaggagtgtttttaattttagtttggtgggttgtaatttttatttttatgtttagatttttgtttttttagtttgtttgttgttttggggatagattggggttaggtttagggaggggagttattagtttgagggtggtatttggttattaggagtttattattttgtagatggatttggtttttttggagaatttgtgggagtatattttttttgtttttaggatttggtggtttatttttttttgttttattttttttttgtggttgtggaatggtgattggtttttgattattttatagatgaggtagttaaggttttagtagttggggtttaggttgtatttttggttgtttaggatttttggagttgggggtagaggagaggagagaggagtgaggaggagggagatagttggtggtgttgtttatagaaggtttggagttttatggttgttattaatttttattttattaattgttgtgaatattattttttttagggagtttgttttgatgatttttttttgtgtttttgaaggattttgattgtagttttagaattttgattattgtggatggaggtgttttgtatttttgatgtttttttgtttagaatatgagttattttatttattattgtaataatatgatatttggtatagaataggtgttattagtatatttgttttaatgaataaaggtgtatttatttaaattaaagatgattttaaatttatttgtaatttaaataattttttgttatgttttttgtattattttgataaattgaattatagatttattatagaaatatagaaaagatagttttgtagtattagtatgtatgtttggagggaaatgtatttatatatgtgttggtttgtatataagagttggggtagatagatgtatggaatattttgtaaaaggagatttaggtaaatgtatatataggtaggtagatttattatttatttatttattatttattatttatttaattatttatttatttgtttatttgtttatttattaattattgattagtatttatgtgggtatatatatatttatatatatatagatatatattttataggttgttaaatgttatgtaatttgaaaaggattttttagtattagagataaggtatattttttgtgtagttgttgttagtattagtttgattagagggtggtagtgtgtttgttttttgggtatgtgttttttaggggaaggagggtaggtgtgtgaaatgtataggaggaagtttagggtgtgtttttaattggatgggggattttagggtataggatttaattttgggttttttttttgtaatttttaggatgttggttttagagtagattgaggaaaggtggtaggagtttaaggttgttttttattggaattatgtttggtgatatagtagttgtgtgtgttttttatttgtgggtttttgtgaattatttttttttttttaaaggtttttttttttagatttttgttttaatgtggttttttttagtagtgttgtatgttaggttttgatttttaagagtggtttggttttggatataggtggggttgggggtttgggagtgtagagagtttagagtagttattatatttggggtttttgtgttttttttttttttggttaaggttgttttttagtagttttgtagagattgtgattttgtgtgtgattagtagtgtatgaagaggtgagaggttttgtgggtaggttttgggggtttggttggtggtgagtaggtggtgggttttaaggtgtattgatataggtagtttagtatttatttatgtagttaatagtgtttatttggttgtggattaggttttttttggggatttttatagttaagtttaggtttgagattttaatgtggtttgagggggatagtagggttagtgggtttttgggatagttgtatgggtatttggttttgttgtgtgtttttgggtaaggtatatgagtttttggtatttttatttgtttaaggataatagggattttaatttgttattttagagtgattataagagttttgggagagtgtaggtgtgggaggatataggaaaatgtttattttttaggagtggaatataaagatgtaataggatgtttggatttggttggatgttgattgatttgtttagttaaaggttgaatgggttttttggaatgttgaggttagagaattttggtttggttttgggattattttatgggaaaaatgtgaggtttttttggtattatgtaataatttgtttaaggggaaaaaattataaaatgatttgggaagtagttttttggtttgttttgttggtttttggagattggttgttttttattttagagaaatgagaagggaaaatatttggtttgatttggtagagtttggagatgaattttagtttatagtttaggattgagtttttagagtgggagatgttgagttgaggttttattttggtttttgttttttttatagtttatttgggtagggttgtggttataatttattttataggaaggaatatgttttttttttttttttgtttatggatattagggttttatttttatttttttagtttagatgttagtaagggttagtgttgagattttgttaggttggagttgtgtggattttttggtttggtgggggttgatagttaggatagtagaggagtagtgtgggtttggtttttagattaagggaggtattgggtatatttagagaggggtggtaggtttgggttttttgattgtttttttatagggtagtattttatgtagatttttttttaggttattagtgatttggttttttttttttttttattgggggttgttaggttttggggtttggtgggaggagatttagtttttgtttttagttttttattgatgttgttgggtgattttggtaggatggtttttttgaggtttagttttgttatttgttaaatgggtatagagatgttgttttgtttttttttgtgtaggtgggaagatttagttagattaaaggtgtggaaattggtggtttatgtttgtaattttagtatatagggaggttaaggagggtagattatttgaggttaggagtttgagattagtttggttaatatggtaaaattttatttttattaaagatataaaaattagttgggtgtggtggtatgtgtttgtaattttagttatttgggaggttgaggtagtagaattatttgaatttgggaggtagaggttgtattgagttgagattgtattattgtattttagtttgggtaataagagtaaaattatattttaaaaaaaaaaaaaaatataaaaattagttaggtgtggtggtgtgtatttgtaattttagttatttgggaggttgaggtaggagaattatttgaatttgggaggtagaggttgtagtaggttgagattatgttattgtattttagtttgagtaagtgagattttgttttaaaaaaaaaaaaagaaggtataggaattattttttaggtgtgaggttaaatagttgtgaggggtattgtggttgtttttattatttagtgtttatagttaagagaaaataatgatggtaatgtataaatgtaatgtttgagatatttatagttggttagattgataagtaatttttttttaagttgttatgtagaagtttttttattatttttttttttttgggtgggtagggtagggtaggatgttttgtttttattttataaataagatgagaggtggagaatttgatggaagttaagtatttgtttagtatttttgaaattttggattttttgtttagtgtattgtagagattatgtttggttagaagttattttaatatttagagttttatggttaaagggaattttaaaaattttgaattttaaagtttttttgaatattgtttgtttattaagtggagttttgtttatatttatagtttttttttttttttaggtatttagtattgagtagtgggagtggggtttgtggttagtttttttagttttttttgagaatttttgggaggttttttgtttttttggggttgtaatgtttattttagttattgagtaggaaaagatttattataattatttaataggatgtttttaggttttagatttttgaaaggaaaaataataagtattagagtgtgggtattttgggtaggtaggatatattggtatttgggttgattttttgggttaattaggtttgagtggttatagtgtgttttttttttattttttggtttaggttgtttggtttgagttaaaatgatttttagttaatttttttttttttagtaatttaaagtaatattgttgtttgttataggtattttttaattttggagggtgattgggaaagttaggaaaaggttagttatggtttttgtttatatattaatgattgtaggtttgaggatattttaaggttgagaagattttgtaggttttaggaagttttgaaggtagaatagggtttggaatgaagggagttgtgtaattgggaagagaggattaaaggggagaaggtggggatataggaaaaagattttttttgggatggggtttgtaggagattggtatattttttaatattagttatgttatagtttgggagaaagaatagttatggggtatggtataggtgtggttgttttattttgtttttaatgtttttttttttgatgataggattttgtttataagtaagggagtttttgtatttttaggatgaggggagagttagtagaggagttgtttttataggaaaaggttttttttatgggtaaaagaatagttaagaggagagtgtgtgtaatttagttaagttatggggtaaatagtatataggatttggatggaggttttagtttttaattatttagttttgtttatttaattgatggtagttgtttttatgtggagtggttaatgtatttaaatttagttagtgagttttattaaatgataattggtgtttgtgtatttttatttattataaaatatttttgttgttgttatttaaatggtatttttttgatgtgttaataattttaaataagggtagtagttattattttaataagttggttgttattaggttagtatggtagtttattagtgggtattggttagaatggagtttaaagagaggttgtggtgagtggttatagttagggaggaggtattgtggtttttttttttttggaagaagatgagttggaatttggagggtttttttttttttttttaaataaaaggtaattatgtagagaattttttgtttaatttttagggaaaattttgattttttttatttgaatgaaaataaaatagaaatataaatggggggatggtatggggggaagggtatgttattaagattatttttttttgtttttaaaatttttttggttttaagatgagttttattgtaaaggtttttaaattgggttgtgtgttggggtttgttaggattgagtagggggtttttttttgtttgtagtttgaagggtttggatttttttatattaggatgttttgttttggtattttttgggattttttttttatttgtttttttttaataattttttttttaagttatagaagaaaagtagttttttttttttttgagtatgattgtagtgatttattttagatgttaaaatttttgtttttaaaggattgattagaaatgagatttattattaattataatggtaatttgatagaagaagttattttattttattttgagatggagttttattttgttgtttaggttggagtgtagtggtgattttgatttattgtaatttttaggttaaagtgattttttagttttagttttttaagtatttgggattataggtgtgtgttattgtatttggttattttttgtatttttagtagagatagggttttattatgttggttaggttgattttaaattattgattttaggtgatttgtttgttttagttttttaaagtgttgggattataggtgtgaattattataattggttagagaagttattttaatatttagagatttatggttaaggagaattttaaaaatttttgtatgtatttatatatttgttttagagatgtatgttaattagtgaaagatttttaggtaaaaaaatatattattaatattttggggggatggagagagtgaaggaaatgatagaaaattttttattattaaagagttttttgtgtattttttggataaatgtaggtggaaattaattggttatagtaattagagattttattggattttttgaggagtgtaatgtaattgtttaattttaatatattaaaaattgttattattttaatatgatggaatattttaaatgtttatttaaaatgtagtattatagagattttttaaaatttttttagaaggattgggagaaaaatttgaagggtattgtttattgtgagtggaatttggatttttggttttataatgtttaggtttttgtgggattgaggtgggtggggagagggggtgaagattagagtaagttgaggatagtatggagtgggattatgggttattttgattttgtttgtgggtagtgatttgatttaagtttttttaggattgattttagatagtggttattaggtttttttttagtttttttggttgttgggatggaggtaattggagggagtagtggttatggtttgttttttttgatttgaaggagtagttagttttaggaatattattttatttgtttggtttttttaaattttggaggttggagaatattggttagagggtggtttattttgtttttttagtgttggaggttttagttttttggagtggaaagtttgtttgattttgtatttttttttggtgttgattagggttgatttttagagtgatggtaattatttgtttgagggtgtggaggggttggttttatttttttggatttagatttggaagtttttggtgttttttatttattggtagatggtgtttttatggtggaggttttttaagttgtagaggatttttgttgtataaaataaggtttgtttttttttgaagttagggttgtttatgttgtagatgtggaattttaggttatttttatttatgatggttaggattaagtatagtgtatttttggttttgtaggtataggttaggttgatttgggagtataagaatagtgttatggggaggttgtgataatggttatttatttttatttttttttttaggattttgggagttggggtgtgagggaatagaggagttttattttgtttttttgtatttagatggtttttgtggtgattttgtttgtggtttttttggttgataaggggtttatatttgttttttttttttagtggattaaggtgagaaggttaaggtgggttagggtaggttagtattttgattttttagtgaatttaatagaatggtgtttgtgttttttttatagaagtatatgtgtgtattagttggggaagattggagggtgtttttttggttagttagaaaagtagggtttatttgtttttttgggtatgggagttatttttatagggttaagtaagggtgagttggaggggtagtggggttttgggaagtggaatatggtttggtaaaggtttttttttgtatgtaggatgtgtttagttgatatggtttggttttgtgtttttatttaaattttattttgaattgtatttttataatttttatgtgttgtgggagggattagtgggagataattgatttatgggggtagttttttttatattgtttttgtggtagtgaatatgttttatagatttgatggttttataaggggaagtttattttatttggtttttattttttttttgttattgttatgtaagaagtgttttttattttttgttatgattgtggggtttttttagttatgtggaattgtaagtttattaaattttttttttttgtaaattgtttagttttaggtatgtttttattagtagtgtgaaaatggattaatagagtaaattggtattagaagagtgaggtattgttgaaaaaaatatttaaaaaggtagatatgattttggaattggtaataggtagaggttggaagagtttgaagggtttagaagataggaaaatgtgagaaagtttggaattttttagagatttgttgaatggttttgtttaaaatgttgaaagtgatatggataataaagtttaggttgaggtggttttagatggaaatgaggaatttgttgggaattggagtaaaggtgatttttgttattttttagtaaagaaattgttggtattttgtttttgttttagagatttttgaaattttgaatttgagagagatgatttagggtattttatagaagaaatttttaagtaataaagtatttaaggggtgatataggtgttgttaaaggtatttagttttgtaagggaaggagagtataaaggtttggaaagtttgtagtttgataatgtaatagaaaagaaaattttattttttgaggagaaatttaggttggttgtttaaatttgtataagtaataaggagttgaatgttaatttttaagattatggggaaaatgtttatagggtatgttagaggtttttatagtagttttttttattataggtttaggggtttaggaggaaaaagtggttttatgggttgagtttagggtttttgtgttgtgtgtagttaagggatttggtgtttagtgttttgagttttagttgttttatttgtggttgaaaggggttaatgtagtgtttgagttatggtggaagttttaagttttggtagtttttatgtggtgttgagtttgtgagtgtatagaagttaagaattgaggtttgggaatttttgtttagattttagaagatgtgtgaaaatatttgaatgtttaggtagaagtttgttgtaggggtggggtttttatggagattttttgttagggtagtgtagaagggaaatgtggggttagagattttatatagagtttttattggggtattgtttattggagttgttagaagagggttattgttttttagattttagaatggtagatttattgatagtttgtattgtttgtttggaaaatttgtagatatttaatgttagtttatgaaagtagttaggagggagatggtattttgtaaagttatagggatggagttgtttaagattgtgggaatttatgttttggtattggtatgatttggatgtgagatatgaggttaaagagattattttagagttttaagatttgattgttttgttggatttttgatttgtatggggtttgtagtttttttgttttggttaattttatttatttggaatagttgtatttatttaatgtttgtatttatattgtatttaggaagtaattaatttgtttttgattttatgggtttgtaggtggaaaggatttgttttgttttagatgggattttggattatgtatggatttttgagttaatgttgaaatgagttaagattttgggggattgttgggaaggtatgattggttttgaaatgtgaggttatgagatttgggaggggttaggggtagaatgatatggttgggttgtgtttttatttaaattttattttgaattgtatttttataatttttatgtgttgtgggagggatttggtgggagataattgaattgtgggtagttttttttatattgtttttatagtagtgaataagttttatgagatttgatggttttataaggggaaattttttttatttggtttttattttttttttgttattgttatgtaagaagtgttttttatattttattatgattgtgaggtttttttagttatatggaattataagtttattaaattttttttttttgtaaattgtttagttttagttatattttaattagtagtgtgaaaatggattaatatattggtttatttggtaaagggttattaagagagggggtttagttttttgttggtggagtttagatatttaaggttttgtgaagtaaggttatggtggggtaggaggggtaaattatattagaaggtaatttttttttatatagggaggtggtatatatgaaatttggttattgtgggttaggttgggaattggttgtgttgtaaaattggtgtattaatattagttatttttgaggaaaggagataaaatggtagttaaggatgagtaagtttatggggattgtgtttttgttgtaatggttgtagttgtttttttttttttatatttgtttaggtgattattgagaaagggatttaggaggtgatattgtgggaattttttgttggggttgtggatggggtatagttaaagaaggtgtagttattgtaattgaaggtttttaaagatgtgttatttagttttgtgaattatatgatttttttttttgagtagaatttgttagtattgtttttttagagataaggttttataggtagtatttaggggtttttgttgaagtggttggtagtggggaggaaggttttggatttaagaaggtttgtagttgaaatgatggttgaagttagttttatttgttttatttttatatattatggtattgtttatatttgtatttttgataaggttggtagttgggggtggtttgggatgagattttaagatgtaaatttttattttttgggagtgttattggtttgtagtggttttgtttgtttgttttgttttgtttttaataaagttttattttgttatttaggttggagtgtagtggtatgattttagtttattgtaatttttgttttttaggtttaagtgatttttatgttttagttttttaagtagttggaattataggtgtttattattatgtttaggtaatttttgtatttttagtagaaatggggttttgttatgttggttaggttgattttgaatttttgattttaagtgatttgtttgttttgattttttaaagtgttgagattataggtgtgagttattgtgtttggttttgtagtggtttaaagatggaaaataatttttatttatggggattgattatatggattatgttttatttttttaggagaatgatgtttaattttaaaaaggggtgtgattagaggtttggatggagaaaaagatttataatgtaagggaaaaatatttttttataagaggtataggaagattttattggttaagaataataaagtttgtgtatgaataaaatatgtttggagtgattatttaaagagggaagttttttgttttattgtgtatttttttgtgttgtttaaatttttattttgtgtatatattatttttaatgtatgtatgtatttagttttagagatgaggttttgttgtgttatttaggttggggtgtagtggtatgattatagtttattgtagttttgaaattttgggtttaagtaatttttttgttttagttttttgagtagttgggattataagtatgtattattgtatttagttttattttttataatagtgtgtagtagaagatattagagttgattaaatatttatgtattttatattttttagttttttttgaaattaatttgtttttgtgttgattggttttggttggtagattgtgggtgaaattgaggaatatttgtttagtagaggtagtggaaagtttttgtgtggaatttttagtatttatttttaaggttttagatggggtagttgttagatggaggagggtggtttaatttgattggattttaggtgagtgatagatgaatttttgttgtatttagttatttagggtttggggtaaatgtgttattgtagtagggtttagtttagattgattaatataatgtatatagatttgatagtgttattttaggatgttggtattaaggtttttattatgatggtattagtttagagggtttgtggaatttatagtttttagtttgggtttaggtgaattttttttgtttattgaggagtttataaagtggtttaggagaatagaggtgttggttttatgtatagtagggagttaggtattggttggttttggggatgggataaagttagttatagttgattataatgggttgtgtgatggaggaatgttttgtggtttttttgtagtttagtgttgttattggtatttttttttttaggggtggggattggttgtattagaggattatgtttttttggagggagggaagttttagtttatagaagggtgagttggttattgggtttagatgtttatttattataaattgattgttgatttttttgaggatttgttttttattgagggttatggattttttttttttttttttgattttttttttttttaagtgtttgtaggtatatattttatttgtggtttgaatttggtaggtatagatttgtagtgtaagaaagaaattagggtggtaggagtattgtggaggtttgttttgagtttttttagggtggggattataggttttttaggtagagaatggatggggttagagttggttttgtttggttttatgagtgttttaggtttttaggatttagtgatgtttggtttggggtttatagttgttttgggtttttgtttttttttttttttttttttaaggatttttagttttggaaggggtagaatgagttatttatattaaggtttagataattgattggggttttaagtattgttttatttttagggtaataggatttttttttattggttgttggtagagaagtttgttttgggaggtagtgataggagatttttaagaatattgattttataatttagataagtgggaattaaagtatttgggtttaagttttagttttgttttatattgtttgtgtgtttttggttgggttatttaattattttggattttagttttttttatttttaaaatgggaataataaggtttgttttatatgttgggaagattgggtaatgtataatgaaattttgaattttgtatgatagtgttatttaggtattgagtggttaaggttgtttagtttttttatgtttttatattttttttttatatatgattagggttgtttatttgttttttgtaggttggattttgtttgaggttggtaggagagtatgtttgttttatttgtttagttttataatttttttttattatagatatatttgatagttttaaggttattgatttttttttatttttattgtttttggggtttatattgagttattggtgtttttgggggatttgtgggttaattttttaggttgatttagaagggataggaaaggtgatttgaatgtaagaatttttaattaaaaatgtgaatgtttatttatttttttgaagttttttttttttagtatttgatattgtttgaaagtgtttttggttattggttgtttg

SEQ ID NO: 237 - DNA, 5096 bp, Artificial Sequence
  chemically treated genomic DNA (Homo sapiens)
gaggttgaggtgggtggattatttgaggttgggagtttgagaatagtttgattaatatggagaagttttatttttataaaaaatataaaattagttaggtgtggtggtgtatgtttgtaattttagttatttggtaggttgaggtagaagaagagtttgaatttgggaggtggaggttgtggtgagttgagattgtgttattgaattttagtttgggtaataatagtgaaattttgtttaaaaaaaaaaaatgtttataattgttattttataagaaaggaaaaagtttttaaagagatatataaaaaggatatttatagataaaagaaattttatatttaggaggttattagattgattataaaatatatttggattttaaaagtattagaatattaggagagaaaaaaaaaaaattaggttaggtatggtggtttatgtttataattttagtatttttggaggttgaggtagatggattatttgaggttaggagtttaagattagtttggttaatatggtgaaattttgtttgtattaaaaattagttgggtatggtggtaggtgtttgtaattttagttatttaggaggttgaggtaggagaattatttgaatttgggaggtagaggttgtagtgagttatgattgtgttgttgtattttagtttgggtaataagagtaaaattttgttttaaaaaaaaaaaaaaaaaagaagaagaagaaaagaaaagaaaattattgttaatttttattatattttgttaaatatatattttgttatattatttgttttagttttaaggttattggtattttttgaagtaattattaaatgtttttattatttaagaatagagagttaatggtgataattaatttatatagagtattgaaaggagttaggttttgtttgtttttttttgtatagtaattttgtaatagtattataaggtaggtattgttattatttttattttataaataagaaaattggagtataggttgggtgtggtggtttatgtttgtaattttattattttgggaggtggaggtgggtgtattatttgaggttaggagtttaagattagtttggttaatatggggaaattttatttttattaaaagtatgaaaaaattagtttggtgtggtggtatatatttgtaattttagttattttggaggttgaggtaggataattgtttgaatttgaaaggttgaggttgtagttagttgagatagagtttttgtatttaggtttgggtgatagaatgagattttgttaggaaggaaggtgatagaatgagattttgttaggagggagggagggagggagagaaaagagggagggagattggagtatagagaagttaattgatttgtttaagaagggagggagggagggagagagggagattggagtatagagaagtgatttgtttaggaaggaaggaaggaaggtaggaaggaaggaagggagggagggaaggaaggaagggagggagggagggagggaaaagagggaaggagattggagtatagagaagttaagtgatttgtttaagaaggaagggagggagggagattgaagtatagagaagtgatttgtttaggaaggaaggaaggtaggaaggaagggaggggtggagggagggaattggagtatagagaattgatttgtttaaggttatttagtagaaggaagggaggaaggaagggaggaaggaagggagggagggagattggagtatagagaagttaagtgatttgtttaagatggatggatatggatggaaggaaggaataaagaaggagggagggagggagggagggaattggagtatagataattgatttgtggaaggaaggatggaaggaaggagagagggaatgaaggaaggagagagggaaggaaggaaggaaggagagagagggaaggaaggaaggagagagggagagagggagggaagggagggaattggagtatagagaattgatttgtttaaggttatttagttaggatttgagtttagaatgtgagtgtttttagttattatattgaattgttttttagttgagaatttttaataaatgtattaggatatatataattggatgttataaggtggtttttggttaatttttttttttaaatatatgtattaattttaaattatttatatgataaaaaatgtttatatttttattgattttgtttttaaaatggtatggttttttaggattattttttataattgttaaagggaaatttgttttgttaatatgaaaaaaaaattaaatatttgttttatgagttgttagtggttaatgttgtttagattatggtttgaatgtattattttttaaagattattttgtggttttgggtaaattgtttagttttttttgtttttttagtggtaaagtggatataataatagtattattttttaaagtggtgaggattagttgatattatttatataaattgttatgtatagtatttgatatagagtgagtgtttaataaatgttttttattatttaggttttgggtttttttatttttagagtgtaagttttttagtaattatagaaatgttttttagagttgttgtttattttttaaaaatatttgtttttattttgtatagagtatagtgatattataaataggtttttttggattttagttttgggggtggttatattattttgtttaggtttaggaagagagagttggttttggttttttatttggtagtagtataaaatttaattaggattttttattttggttaatttttgaattattgtgtttagtttggttggtttggtagtagatggaatgagggtgttggtgttaggaagtggtgtttatttatttgtttagtttgaggtgggtattttttttttatagtatttttggggattttgtttttttattgtggaatgttttagaggattgatttaatagtgttatagggtgggtttttttttaaattttttaaaatatattgttatgattttgaaatgggagttgagggagatgtattaagtgttttttgatgttaggtgaagtgtattatatttggtgtgtgtgttgagttttgaattgaagtttgtgtggttgttatttttgtttttttgttgggggttttagagagtgtgttttttgtttatgtgtgtgtagggtttgtagttgtttttatgttttagtggagttgtagtatgttttttttatttattaggtgaagagtttgttttttattttgtgtagtaggttggagaatttggttgttgttttttttgtgaggggttttggggtgttggggtttgttggtgagtttgtttttattggtgtttttgtgtgtttttggtgtttaaaatttttgaagtgttgggttttggaagatgggaggtggtgtttgtgtggttggttggggttttgttttggttttgtgtttttttttttgtttttttgtttgtgttttttttgtttttttgtttggtttttttagtgattaattattaattgttaagttttaagggttagataatatatttgtagattataatttggtatttttagggtggtaggaggagaaagggtaattttttttttgttttggtagttgagttttattgttgagtggtatttagtgtgtttttaggtttttagggttttttgtttgaaattataagatatagtgatatgaggttattgtaggtgatttttaagttaagaagtggtgagtgagtagtgagttagaagtagtgagtgagttgggatttttttaattggaaggattggttgattttttttttttttttttattttttttttttttggttgatttgtataaaattgttttattaaaataattgaaggttggtagggtgtgttggtttatatttgtaattttaatgttttgggaggttgagatgggtggattatttgaggttaggagtttgagattagattgggaaatatggtgaaattttgtttttattaaaaatataaaaattagttgggtgtggtgatgggtgtttgtagttttagttatttgagaggttgaggtaggagaattgtttgaatttaggaggtggtggttgtgagttaagattgtgtttttgtattttagtttgggtaatagagggagatgttgttttaaaaaaaaaaaaaaaaaaaaaaaaaatttgaaggtgttttaggtttgtgttgtttttttttgtaaaatatgggtaagattttaaaaagattttggaaatgtgtttttgtggtgtggatggaggtgtggtttattttttgtggtgtgttggttttgttttttagtatttagttgtttttgttgtgttagggagagagatggtgttaatttttggtgtttggtttggatgttttgttttggttatgttttttgaggtttttatgggttaaagagggattaagagatattaagttggggttgaaaagtttttgttattgattttttgtttttggaaaggaggagatttagaaaataaaagaaaaggtgttgggattttttatttttttttggttatttgttttgggggttggggtgggttaaaataaatgtaggtttaaatagataggttgtgtagatgagttggtaattttgtaagaggagtttaagaaaaaaaatagtttttgaaaatgaaatattattttaggaattttaagtttagtagttgtaggaattttaaaaaaatttttgaaattaagaatgtggttatttgtagagattaattaagtattataatataagtatattatgaaataagaggatattagaagtatatttaagatgttatttttgtaaagtaaataatttatttaattttgtatattgataatgttgaattttatttgagttttgtgtttttggaaagtaatgataattaagaaatttttttaggttgggtgtggtggttgatgtttgtaattttagtgttttgggagattgaagtgggtggattatttttgaggttaggagtttgagattagtttgattaatatggtgaaattttgtttttattaaaattataaaaattagtttggtgttttggtgtgtgt

SEQ ID NO: 238 - DNA, 5096 bp, Artificial Sequence
  chemically treated genomic DNA (Homo sapiens)
gtatatattaaaatgttgggttaatttttgtagttttagtagagatgggattttgttatgttggttaggttggttttgaatttttgattttaggagtaatttgtttgttttggttttttaaagtattgggattataggtgttagttattgtgtttggtttaggaaggttttttaattgttattattttttaggagtatagggtttaggtagaatttaatgttgttaatatgtagggttaaatgagttgtttattttataaaagtgatattttaaatgtgtttttaatgtttttttgttttataatatgtttgtattataatatttaattagtttttatggatgattatgtttttagttttaaaggtttttttgaggtttttgtagttgttaaatttggggtttttgaagtaatattttatttttgaaagttgtttttttttttagattttttttatagaattgttagtttgtttgtatagtttgtttatttgaatttatgtttattttgatttattttaatttttaaagtaggtggttaggaaaaaataaaaggttttaatatttttttttttgttttttggatttttttttttttggaagtagggggttagtgataggaattttttgattttagtttagtgttttttaatttttttttagtttgtggaagttttggaaggtgtggttagggtagggtatttaagttgagtgttgggggttggtattgtttttttttttggtatggtggagataattgaatattgaaagataaaattaatatattgtgaggaatgagttatgtttttatttatgttataaaggtatgtttttaagatttttttaggattttatttatgttttgtagggaaaagtgatatagatttgaagtgtttttaggttttttttttttttttttttttttttaagatgatgtttttttttgttgtttaggttggagtgtaaaggtgtgattttggtttataattgttgttttttgggtttaagtgatttttttgttttagttttttgagtagttgggattataggtatttgttattatgtttggttaatttttgtatttttagtagagatggggttttattatattttttagtttggttttgaatttttgattttaggtgatttatttgttttggttttttaaagtgttgggattataggtgtgagttaatgtgttttgttagtttttagttattttaatgaagtgattttgtataaattagttagagggagggagagtgggagggaagaggaggggttagttagtttttttagttaggagagttttggtttatttattgtttttaatttattgtttatttattgttttttagtttaggaattatttataataattttgtgttattgtattttgtgattttaaataaggaattttaaaaatttgaaggtatattgggtgttgtttaataataaggtttggttgttaagatgaaaaaaaaattgttttttttttttttgttattttggaggtgttaggttgtaatttgtaaatgtattgtttggtttttagggtttgatagttaatgattggttgttgaaggagttgagtggaggagtgagagggatgtgagtaagagagtgagggagggagtgtagggttagagtggagttttagttggttgtataggtattgttttttgttttttgggatttggtattttgggggttttgggtgttggagatgtgtaagggtgttgatggaggtagatttgttagtgggttttggtgttttagagttttttgtggagggagtggtggttgagttttttagtttgttgtgtaggataaaaggtaaattttttatttggtgagtggaaggggtgtgttgtagttttgttggggtgtgggggtggttgtgggttttgtgtgtatgtggataaggagtatattttttgaggtttttagtagggaggtagaggtggtggttgtatggattttggtttggggtttaatatgtatattaggtatggtgtgttttatttggtgttgggaagtatttggtgtgttttttttggtttttgttttgaaattgtggtgatgtattttggaggatttggggggaaatttattttgtggtattattaagttggttttttggggtgttttgtggtggagggatgaggtttttggggatgttgtgaaggaggagtgtttattttgggttgggtaggtgggtgagtgttattttttggtgttggtgtttttattttatttgttgttgagttagttagattgggtgtggtgatttaagagttgattgaagtgagaaattttggttaagttttgtgttgttgttgggtgggagattagagttggttttttttttttgggtttgagtgaggtgatatagttatttttagggttggggtttagggaagtttgtttgtggtattattatgttttgtgtgaagtagggataaatgtttttaaggagtgggtagtgattttagaaagtgtttttgtggttgttggaggatttgtattttggaaatgagagaatttaggatttaaatagtgaaagatatttattgggtatttgttttgtgttaggtattgtgtataataatttatatggataatattagttaatttttattattttaggagatggtattattgttatatttattttgttgttggagaaataaagaaggttaagtaatttgtttaaggttataagatgatttttaaggggtgatgtgtttaagttgtagtttaaatagtgttggttattgataatttatgaaatagatatttgattttttttttatattaataaagtgaatttttttttaatgattgtgaaagatagttttgaaaagttatattattttaaaaatgagattgataaaggtgtaagtattttttattatataaatagtttgaaattgatgtatgtgtttaaaggggaaagttggttgaaaattattttgtagtatttagttgtgtatgttttgatatatttgttaaaagtttttagttgggaggtaatttagtgtaatggttaagggtatttatattttggatttaaattttggttgggtgattttggataagttagttttttgtgttttagttttttttttttttttttttttttttttttttttttttttttttttttttttttttttttttttttttttttttttttttttttttgttttttttttttttttttttgtttttttttttataagttagttatttgtattttagttttttttttttttttttttttttttttttgttttttttttttgtttgtgtttgtttgttttggataagttatttaatttttttgtgttttagttttttttttttttttttttttttttttttttttttttttttttttgttgggtgattttggataaattagttttttgtgttttagttttttttttttgtttttttttttttttttgtttttttttttttttggataagttatttttttgtgttttagtttttttttttttttttttttttggataagttatttaatttttttgtgttttagtttttttttttttttttttttttttttttttttttttttttttttttttttttttttttttttttttttgtttttttttttttttttttggataagttatttttttgtgttttggtttttttttttttttttttttttttttttttggataagttaattaatttttttgtgttttagtttttttttttttttttttttttttttttttttttttttgatggagttttattttgttatttttttttttgatagagttttattttgttatttaggtttgagtgtagaggttttattttagttaattgtaattttaattttttgggtttaagtgattattttgttttagtttttgaagtagttgggattatagatgtatattattatgttaggttaatttttttatgtttttagtagagatggggtttttttatgttgattaggttggttttgaatttttgattttaagtgatgtatttatttttgttttttaaagtagtgggattataggtgtgagttattgtgtttagtttgtgttttagtttttttatttgtaaaatggagataataatagtatttattttgtagtgttgttataaggttattatgtaggaaagggtagatagagtttggttttttttagtgttttatatgggttagttgttattattagttttttatttttgggtgatgggaatatttggtgattgttttaggagatgttagtggttttgaggttggggtagatgatatggtaagatgtatgtttaataagatgtgataagaattaataatgattttttttttttttttttttttttttttttttttttttttttgagatagagttttgtttttgttgtttaggttggagtgtagtggtatgattatggtttattgtaatttttgttttttgggtttaagtgatttttttgttttagttttttgagtagttaggattataggtgtttgttattatgtttggttaatttttaatatagataggattttattatgttggttaggttggttttgagtttttgattttaggtgatttatttattttagtttttaaaagtgttgggattataagtgtaagttattgtgtttggtttgatttttttttttttttttttaatgttttgatatttttggaatttgggtatgttttataattagtttagtagttttttaaatatgagattttttttgtttatgaatgttttttttatgtatttttttgagggttttttttttttttgtggaatagtagttatgggtattttttttttttagatagagttttattgttgttgtttaggttggagtttaatggtgtgattttggtttattgtaatttttgttttttgggtttaagttttttttttattttagtttgttaagtagttgggattataggtatgtattattatatttggttaattttgtattttttgtagagatggggtttttttatgttggttaggttgtttttgaatttttaattttaggtgatttgtttgttttggtttt

SEQ ID NO: 239 - DNA, 3072 bp, Artificial Sequence
  chemically treated genomic DNA (Homo sapiens)
ttttaatttagtgggatggtttgtatttttatttgttaaatttggtaatttttggggttggggtttggggtttggtaatttttggggtgggaggtttttgtgtagagtttaatttgtttgttaaggtttatttattggagaagaattggttgatggaggtgggtaggagtgtgaggaaggttaaggggtgggtgaaggagatggaaaggatagtggagatgtaggttatgttggttattatggagtagaggtaggttagggaggtgtagaggtagaataggatgaagttgtgtatgtttttgttgttgatgtagttgttggtgaagaaatagtgatggttgtgttttagggtgattttggtgtatatttggtagaagtgggtgttaggtgaggggtatggagtttttttggttgaggttttttggtaggtttttaggttgtttggggagttttggatgataaggatgtaattgtttagggtgttggttgagaggaataggaagagtgttttgtggagtagggtgggtgagaagagttgggtggttgtggggtttttgtgtatgttgggtaggaagaggaagagttgtagtatgaaggttattagggagatgtataagaagtaggtgggggttattatgttgagtagttgtagggttagtatttttgattatatttttgtggggtttggggtgagaagaggattgattgattatggtgtttagggggtgtttttgtttgtttttttgtgttgtgtgtttggggtattgtatgtgattttatgtttttaattttttgttttgtggattttttttttttagttttttaattttggattaggtaggttagagatttgagtttgtagtggttttgggtttaggttttatttgggggtgagtgttgtttggggttttgagtgagtttggtgttttggtgtggtagagtttggtataggagggagggatttgtttgtagtttttaggagttgtgagggtggggggtattgggggataggattttttttttttgtggatgtggaaataagtttaggtttgggatttttggtttagatttttttaggaggagaaagggaaggatttggggttgggggtaggagaattagtggtatttgatttgttggaaattttgttttatatttttttttttttgtttttgtgtttttatttatatatatattttgggtagtatttagggattttattaggttatttaaggttttttggaggtatgtgtgtgtgagggattatgatgtgtgtgtgtgtgtttttgtttgtgattttgtatgtgtaatttgtgtgtgtttgagtatttgtatttgtgtatgtatatatttgtgtgtatagatatgtagtttttgttatttagttttaaaaaaattaattgaaataattgatatatttatatttgtttttgggtattgggtgaggtgggggtgtaattagaatatttgtgttagtgggttttggttagtatatttttttaatgttggttgtttgggttatttttttgtgaagagtgtttttatttgaggtgaaattaaaattttttttttgtgtttgttttttgtttttttgttgagagaaatttaaataatttttatggtgttgaaattttttttatgttgataagtttgttttgggtgtatgagtggatgtttggttagttttttttgggattgattttgttgttgtgtttagtttttattatgtttttattttattttatgttttatagttggggtttttggttagttttggaagttattgagaaataggattttgtgtgtttgagagaatttttttaggggttaaggaattggttagttggaggtgtgagaaaagttttgggaaggtggttgtatttaggatgggtggatgttatggggtttttgtttaggttgttttgtttgtatgggttgattggttattttggaattttttttgtaggttttagtgttttttgggaatttgtagtttttgtggagagtgtgggtttttttttattgttggggtgtagtgtagtgtatgtttgagggtggttgttgggggttgggtatgtttttagttttgtgttgttgggggttgtggtggtgttgtttattttagagagtttttggtttggggttttggtgaagtaagtgtttttttggtgttggttgttaggggggtgtgggagtagttagatgtgttgtagtgttgggaaggtggtgaaggataggggttaggggagtgaggggtgtttggtaggtagttttagttttggttttgtgtgggagaagggatagtagagattgtttgtggggttttggggtgtagggagttgtttgtttagttttggtgtttgttttgtttgtggtagagggtggtatagttggagttttggaaagattggtagtgttggtagttgtgggttttttggttattgttttttggatgtatgggaagttgttttttgtgttgttgttgttgtattgttgttgttgtagaggggtgaggaaattaatttattgagttttggttgttgataagaggagttttggatgttggtttttgttttgtttgaggttgtaaagttgtggatttggtttggttggtttgtagtttgtgttttgttttgggaattgggtaagtagtggggatgtggggaggagggagtgggtagttgttggttttttatttgggtgttagtgagtaagggttaggaagtggtggggatggtagttgggtattttttagttttgttatttttttttttgtttttgggggtggtgttttggttgttagttttagtattgtggatttgtttttttttttttttttgattttttttgagtgggttggggtgttttgtttggttttagtgtttgttttagttgggagattgggatttagttttgatgtggattttttagttattattttgttttttttttttggttaggttttatgattttttttgttttttatttggattgaaggaattttgggggtttgagaggttagtttgttagggtaatatttatgaagattagtgttatttttttggaagggttgt

SEQ ID NO: 240 - DNA, 3072 bp, Artificial Sequence
  chemically treated genomic DNA (Homo sapiens)
atagtttttttgaggagatgatgttgatttttatgggtgttgttttggtaagttgattttttaagtttttagggtttttttagtttgagtggagagtagggaaggttgtgggatttagttgagagggaagggtaggatgatggttggagaatttatattagggttgaattttaattttttagttggaatgggtgttgaaattaggtagggtgttttagtttgtttaaggggaattgagaggggaggagggggtaagtttatgatgttgagattggtggttagagtattgtttttaggagtggagggaggggtggtggggttggggggtgtttagttgttatttttgttgttttttggtttttatttgttggtgtttaagtgggaagttagtagttgtttgtttttttttttttatatttttgttatttgtttagtttttgaagtgaagtgtaggttgtgagttagttgggttgagtttataattttgtagttttgggtagggtgagagttggtgtttggggttttttttgttggtgattagagtttggtgagttgatttttttatttttttgtgatggtggtagtgtggtggtggtggtgtggggggtggttttttgtgtgtttgggaggtagtggttgagaagtttgtggttgttggtgttgttggtttttttaaggttttggttgtgttgttttttgttgtgggtgaggtgggtgttagggttgaatggatagttttttatattttggggttttatgggtggtttttgttgtttttttttttgtgtagggttagggttgaggttgtttgttgagtgttttttatttttttagtttttgttttttgttgtttttttagtgttgtggtgtatttggttgtttttgtgtttttttggtgattggtgttgggaaggtatttgttttgttggagttttaggttgagggttttttggggtgggtagtattgttgtagtttttggtggtgtaggattgggggtgtgtttagtttttggtgattatttttaggtgtgtattgtgttgtgttttagtggtagggagaggtttatgttttttgtggaggttgtgggtttttggggggtgttgggatttgtaaaggggattttaaggtgattagttgatttgtgtggatgggatagtttggatggaggttttgtggtatttatttattttaggtgtaattgtttttttagaattttttttgtgtttttggttggttgattttttagtttttggaaaagtttttttgggtgtatggaattttattttttggtggtttttgaagttggttaggaattttggttgtgaggtgtggggtgggatggggatgtggtgagggttgagtatggtggtggggttgattttaggaaaggttggttaagtatttatttgtgtgtttagggtgggtttgttggtatggaaaggattttggtgttatgagggttgtttgggttttttttagtaggagggtgggaggtgggtgtgaaggggggattttaattttgttttaaatgaaaatgttttttgtaaagaaatagtttgggtagttagtgttggagagatgtgttggttaggatttgttgatataggtattttggttgtgtttttattttatttggtgtttgagagtgagtgtgagtgtattgattgttttaattgatttttttaaagttagatagtagaggttgtgtgtttgtatatgtagatatatatatatataaatatagatatttaagtgtatatagattatatgtatagagttatagataaggatatatatatatatattgtggttttttatgtatatatatttttaaagagttttgggtaatttggtgaggtttttgagtgttgtttaagatgtgtgtgtgggtggggatgtagggatggagaaaggggagtgtgaagtaggatttttagtaggttaagtgttgttgatttttttgtttttgattttaaatttttttttttttttttttagggaggtttgaattagaaattttaaatttgggtttgtttttatatttatagaggggaggagttttattttttggtgttttttatttttataatttttaaagattgtaaatgagttttttttttttgtgttagattttgttgtgttaaggtgttgagtttgtttaaaattttaggtaatatttatttttaggtggggtttagatttgaggttgttgtgggtttgggtttttggtttgtttgatttggggttagggaattggggaggggaaatttgtgggatagggggttgggggtgtggagttgtgtgtagtgttttagatgtgtggtatggaggagtgggtgagggtgttttttggatgttgtagttagttagttttttttttattttgggttttgtaggaatgtaattgaggatgttggttttgtggttgtttaatgtggtggtttttgtttattttttgtgtatttttttggtgatttttgtgttgtagttttttttttttttgtttagtatgtgtgaggattttgtggttgtttggttttttttgtttgttttgttttatggggtgttttttttattttttttggttaatgttttgggtaattatgtttttgttatttagaattttttagatgatttgggggtttgttagggggttttggttaggaagattttatgttttttatttagtatttatttttgttgagtgtgtgttagagttattttgaggtatgattattattgtttttttattggtaattgtattggtagtaggaatatgtgtaattttgttttgttttgtttttatatttttttggtttgtttttattttatggtggttggtgtggtttatatttttgttgttttttttattttttttgtttattttttggttttttttatgtttttgtttatttttattagttagtttttttttggtgagtgggttttggtgggtaggttgggttttatataaagattttttattttaaaggttgttgggttttaaattttaattttaaaagttgttagatttagtaaataaaaatatagattgttttgttaaattaaaa

SEQ ID NO: 241 - DNA, 3845 bp, Artificial Sequence
  chemically treated genomic DNA (Homo sapiens)
ttgttttttatgtttaagtaatttttttgttttagttttttgagtagttaagattataggtatgtgttattatgtttagttaatttttttgttttttgtagagatgggttttattatgttggttaggatggttttgattttttgattttgtgatttgtttattttggttttttaaagtgttgggaatataggtgtaagttattgtgtttagtttatattttattttttgattgatttttgtgattagagttaattttttatgttattttatgtgaatatgtattaatgaattattagaaattgtaatgtttttgtaggttaaaataatttaatattgataattttatatgatttagtttaatatattattttttttattagttatattgtatgttattatttatatatatgtttatttagttagtttatttgttttttgtgaggaatattatatagtttttgagattttgttatgatagaagttagtattgataagtttttgtgtatttgttttaatgtaggattattgggaattgagtagtagtttatagggtttgggaggggatttaattatttagttaatttttatttatattatttttttttttttgataatgggtaattgagaaagggtaaatgtgtgtaaaaattatgtagatgtagttttaggattattttttttttttttgtagtgtttttttttaagttatattagtgtttaaattttggagttattgatgtttttgttatttttgtagatagaatattatgttgtaaataatgtttatttgtttattagtattatataaaagtgtttgtttttttttattttagttattattgattattggtaaaaattttaatgtatttaattttaataggtaaagaaaggtttttttatttagattttaggtgggggtttaagtttatatttttgttttataaaaattgaatagttagtgtttttgagttgaatgatttatttattttgtataggagagtttaattatattgtgattttgggggagataatttttataatttatttttttaaaatgtagaaagtagaaaaagggtagaaaaattgtattaaatttgaataatgtagtatgtttttagagttagggatatttttttttggaaggattttaagtttggtgtatttgtattgattgtggttatggtgtatttaatttttttaaattagtttttttgtattgtatataggaagatttgagggtgagtgtaaattaggattgtttggttagtggtgtgtgtaaaaatttattgtagaattaagaattatttttttagtattttatatattttaaaaaataggtagatatgtttattgattttaggttgtttatggtttttagaggtttttttttattgtaatagtgttgtggggttttaggggtttagtagttttttttttttaggttattttggtgagggagggagttgggatttttgtattgtggtaaataagtatgtttgtgtggttgtagaggtaggttggtgtgtatgtttaggtggggatgtgtgtgaagtttgttgttgttgtagtgagtttggtgtagagtggagtggttgttggagatgtttgatgtatttgtttgaggagtggttagtgatgtgatggagtgggtaaggttagttgtgttggtggttttttttaagagatagtttggggagtggttatttttatttattagatattttaagtttttaggatttggagtattgaataaatggaatttgggttttaaagttttttgttttggagaattagatttggaatgtttagaggtttgttgttgtgttgttttgttttgatggtattttgtttgtttgtattggggtgtgttttttatttgtttttaattgtggtgttgtgataggttttattgtgggtgtttgtggtgggaagggtggtggtgattgggagtatgtggggtaattgtagtgggtaagggatatgggtggaggtgggtatattagggtgattgtagttttgtgtggtgagggtatgtggggggattagtgtatagggattttaggtggaggtaggtatattggagtgattgtggtggggtgaaggtatgtgaagtgattggtatttagggggtgttgagtgtaggtaggtgtataatagtgattattgtgtggtggagtagggtatgtggggtgattggggggggaatttgttgtagtgattgaggtgaggaggttatggtagtggattagggggatgagttggtgtgatagtggtgggggttgtgttggtggttgtggtgtggggagagtttgtaggaagtggttgggaggtagggggaaggtggtgatagtgggtattggtggtggtgggtattggtagtgggtaggtatggtggtggtggattttggtggtggtaggtatggtggtggtgggtatggtatggaggtggtgggtatggtggttgtggggtttgttgttgtttggagtgattaagggatgttgaatgattgttgtgtagaggagggggtattagaaggggtagtagtatagtttgtagtttttaatttttttgtgatttgtgatggttatttggtttgtttattgtggtggtggtgtttttttattaaaattgtgtaatgtttatattgttgtaggggttgtagaaatgtgtggaatttttgtgtattttttaggaatttttgttttagaggttatggtataagaagattggaatgatgtgtagaatttgtatttatagattttttgattgataggttaggtgatgtttgggggttattttttttttattgtttttttttgttgggaattaggttttggaaggttatgttgaaataatttgggggtttgtgttgtgttattgttattgtgtagtttttttaagatggttgttgttgtagtggtttagatttgtgtaagtgttttagtgggggggtggttgttttttttttgtagagttgttagtggggagggggtaggtggtgtgtgtttagtttttgttgttttggagttttagttgtattttttttagggtgtagtggtaaggagaggaagttggttaaggtgggtggttgttttttttttaaagtgttgtttgggaaaggatgtaggttgtgtagatgtagtagaggtgatagttgtttttgtttgtagtggggtgagatgtggggtaggggagtgagggtttatgtagtttttgtttggaaggaatggtagtttttttttttatttggttgatatagtagttgtttttttttggttgtggtgtagtagaggggggaggagggagatgggttggtgtaggttttgtttagtaagtttggtagttattttttatttatggtgtagtagtagaggattggaggggaatgtggttagaggttaggtatttgtattatttttgtttgtgtgggatggtagttgtattgggttattgttttttagttttgtagtaaattagagtggtggtggtttggaggttattaaaggtgtagttattttaagatttgttgtgttgttttagtaagtttttattaatgatagagattttaaattggttttttgattttttggaaaattgtatttttttatttttgtagttttttttttggttgtattgtgtgttaattttttatttttaaattggatttgttaattttttttttttaattttttgtagtttttgatttttatttgatatatttaataaatgttattatttaagatttagttattttttttaatttttggatagtttattttgatgtattgtatattttttttaaatgggttgggggagaggatattgtgatggttttttttgatt

SEQ ID NO: 242 - DNA, 3845 bp, Artificial Sequence
  chemically treated genomic DNA (Homo sapiens)
agttgggaagagttattatgatgtttttttttttaatttatttaaggaaagtatgtagtgtattagaatggattatttagagattaagaaggataattgaattttaaatggtgatatttattaaatgtgttgaatggaaattaaagattatagggagttaaaaaaaaggggttaataagtttagtttgaaaatagagaattagtgtataatataattaagagaggaattataaaaatgaaaaggtatgattttttagggagttagaaaattaatttaaaatttttattattaatggaggtttgttgaaatagtatagtaggttttggggtggttgtatttttgatggtttttaggttgttattattttagtttattgtagagttgaaaagtagtagtttagtgtagttgttattttatataggtggaggtggtataaatgtttggtttttagttatatttttttttagttttttattgttgtattgtgggtaaggggtggttgttaagtttgttaggtggagtttgtgttaatttatttttttttttttttttttattgtgttataattggaaaggaatagttgttgtattagttaggtgaaggggagggttgttattttttttaggtaaaagttgtgtaagtttttgtttttttgttttatgttttgttttattgtaagtggaggtgattgttatttttgttgtgtttgtgtaatttgtatttttttttaagtagtattttggggagggggtagttgtttattttggttggttttttttttttattattgtattttaaagagggtatggttgaaattttgaaatagtagaagttgaatatatattatttgttttttttttattggtggttttatagggaggaagtggttatttttttgttgaagtgtttgtgtagatttaagttgttgtagtggtggttattttgaaggagttgtataatggtagtgatgtaatatagatttttaggttattttgatatagttttttaagatttggtttttaatagagagaaataatgaaaaaaaagtaatttttaggtattatttggtttattagttaaaagatttgtaaatgtaagttttgtatattattttagtttttttatgttatagtttttaaagtgagggtttttaaagggtatgtaaggattttatgtatttttgtagtttttgtggtagtgtaggtattgtgtagttttaataaaaaagtattattattatagtaggtaaattagatgattattgtaggttataggaaaattaaaggttgtggattgtgttattgttttttttgatgtttttttttttatatagtaattatttagtgttttttagttattttggatagtgataggttttgtggttgttatgtttattgtttttatgttatgtttattgttgttatgtttattgttgttaaagtttattattgttatgtttatttgttgttaatgtttattgttgttaatatttattgttgttgttttttttttattttttagttattttttatggattttttttgtgttgtgattattaatataatttttattattgttatattgatttatttttttggtttattgttatagtttttttgttttggttattgtgatgaattttttttttagttgttttatgtattttgttttattatgtagtggttattattatatatttatttgtgtttaatattttttaaatattgattattttatgtatttttgttttgttataattattttaatatatttatttttgtttaaaatttttatgtattggtttttttatgtatttttgttatatggaattgtaattattttgatgtatttatttttatttatgttttttgtttattgtggttattttgtatgtttttagttattattgttttttttattgtagatatttgtaataggatttgttgtgatattatagttgggggtggatgggggatgtgttttaatgtgagtggataggatattattggggtagaatggtataatagtaagtttttgaatattttggatttggttttttagaataaaggattttagggtttaaattttgtttatttagtattttaagttttaaaaatttggaatatttgatgaataaaagtggttgttttttaggttgttttttgagagaagttattggtatagttgattttgtttgttttattgtgttattgattgttttttagatagatgtgttaggtatttttggtggttgttttattttgtgttagatttgttgtagtagtggtaggttttgtatatatttttgtttgagtatgtgtgttagtttgtttttgtggttgtgtaggtgtgtttgtttgttgtagtgtaggggttttagtttttttttttattggaatgatttggggggagggggttattggatttttagggttttatagtattgttgtaatgagagggggtttttagaaattataagtaatttgggattaatggatatgtttatttgttttttaaaatgtgtaaaatattaaagaaataatttttggttttataataaatttttgtatatattattggttaaataattttaatttatatttatttttaggtttttttatgtgtggtataaaaaagttggtttggaaaagttaaatgtgttataattataattaatgtaaatatgttagatttgaaatttttttaaaagaaaatatttttaattttaaaagtatgttatattgtttaaatttggtgtgatttttttattttttttttattttttatattttgagggggtaaattgtgaaaattattttttttaaaattataatataattaaatttttttatatggaatggatagattatttaatttaaaaatattggttatttaatttttgtaaaataaaaatatgaatttagatttttatttaagatttaagtaggagagtttttttttgtttattagaattggatatattaaaatttttattaataattaatgatagttggagtggggagaaataggtatttttatataatattaatggataagtaaatattatttatgatataatattttatttgtagaaataatggaagtattagtaattttaaaatttagatgttgatgtagtttgggaaaagatattgtagaaaagaagaaaataattttgaaattgtatttgtatagtttttatatatatttgtttttttttaattgtttattattgaagaagggagggtgatgtgagtggaggttgattaaatggttaaatttttttttaagttttgtaagttattgtttagtttttaatgattttatattaaaataggtgtgtagaggtttattaatgttgatttttattgtaataaaattttagaaattgtgtaatgttttttatagagaatagataggttaattaaataaatgtatatataaataataatatgtaatatggttgatggaaaaaatgatgtattaggttgaattatataaaattgttaatattgaattgttttgatttataaaaatattgtaatttttaatagtttattgatatatatttatataaaataatatgggaagttgattttgattatgggagttaattgaaaaataaaatgtaggttgggtatagtggtttatgtttgtatttttagtattttgggaggttgaggtgggtagattatgaggttaggagattgagattattttggttaatatggtgaaatttatttttataaaaaatagaaaaattagttgggtgtgatggtatatgtttgtaattttagttatttgggaggttgaggtaggagaattgtttgaatgtgggaggtgg

SEQ ID NO: 243 - DNA, 18463 bp, Artificial Sequence
  chemically treated genomic DNA (Homo sapiens)
tttgagtaggtgtgtattttgtagataggtttagtgttttttgtttgttaggtgttgagttggatggtaggaatatattttattgggtaagatttggtgtttagttttttaaggtattagttattgggttgaaagagagaaataagttaaaaaatggaaaaattagttagaagtttagtatatgttttaaggaagttagtaggttgtagtgtgagagaattagtaaaagtgtatttgatttagataggggtgttggaagtagttttttaaaagtggtgttgtttttgaaatgtagtttaggatttgtatttatgtgtaggaagttttatagtatgagaggtttatatagggataaggtgttaagggggattgaggggtatgaggggattgagattatttttggtttgtattgttgttgtggtttgggttttggtgatttaggagtagggagaatagagagttttgtttatatttgagatattagagggagagatgttgtattagtttgtgtttatgttgttgataaagatatatttgagattgggtaatttattaaagaaagaggtttaatggatttaaatagttttatttgtgggggaaggttttataattatggtagaaggtaggaggagtaagttaagttttatatggatggtagtaggtaaagagagagggagtttgtgtagggaaatttttttttataaaattgttagattttgtgagatttatttattattatgagaatggtatggaaaagatttgtttttatgatttaattattttttattaggttttttttatagtatgtgggaatttaagatgagatgtgggtggggatgtagttaaattgtattagatttttaaaggttagatttagtaggtgttgttatagtaaagagaattgttgggtatagtggtttgatatgggtgggagttttggtttgagttttggatatggaagggatttagaggaggttttggttgtttgttggtgttgaaggttgagatttggaaaggtgatggggggtgtaggtaaggtagaaaggaaatttttaggtttaggtagaagtattatgttgtttatatttttttgggaagtggtatttgtgggggtggttagtaagattttttggttatgggatttttaagatgtatttttttatgttgtttttttagatattttggttattttgttgattgatgtatttttgttgttataagaaaaagattagaaatatgtttttgtttttgtggtatgtattttgtttttttagatgaagggttggttgggtgttgtggtttatgtttataattttagtattttgggaggttgaggtgggtagattatttgaggttaagagttgaagtttagtttggttaatatggtgaaattttatttttattaaaaatataaaaattagttgggtatggtggtttatgtttgtagttttagttatttaggaggttgaggtaggataattatttgaatttaggaggtgaaggttgtagtgagttgagattgtgttattgttttttagtaagattgtgttattgtttttttgtttgggtaatagagtgagattttattttaaaataaaaaaataaaataaataaataaaaaatagatgaagggttttgtttgttgtgattttgttgggaggttggttgaaattgtttatggaaggggtatttgtgagttttttaggtttatatagttgggattataggtgtttgttattatgtttggttaattttttgtatttttagtagagatggggttttattatgttggttaggttggtttttattttttaattttaagtgatttttttgttttggttttttaaagtgatgggattatagttgtgtgttattgtgtttagttgttggtgtgtttttaattagtgtatttgtttgttgaggttgttgtaaataaagtattatggattgggtggtttagattatataaatttattgttttatgtttttgtaggttgaaagtttaagatgaaggtattagtagggttggttttttttgaggttttttggtttgtaggtagttatgtgtttatttgttttttgtgtttttgagtggttatttttttgtgtgtgtttttgtgttaatttttttttgttagaaggatgttagttagattggatttgggtttgtttatatgattttattttgttataattatttttttttttttttttttttttttttttttttgagatagttttattttgttgtttaggttggagtgtgtaatgatataattttgatttattgtaatttttattttttgagtttaagtgatttttttgttttagttttttgagtagttgggattataggtatttgttgttatatttggttattttttgtatttttagtagagatggggttttattatgttggttaggttggttttgaatttttgattttaagtgatttgtttgttttagttttttaaagtgttgggattataggagtgagttattatatttgtatattaattatttttttaaaggttttatttttaaagatagttatattttgaggtgttagggtttaggattttatatgaatttgtggggaatatagtgtagtttattttagttagttaaaatgtgtattttgttggtttgtggaagtattgttttttgaaggatgtgtgatagattagaaatattggtggttttgggtggtttgaggtataagatagagatgggtttatttgttgttatatattatatattgttgtattttttgagtttttttgtgtgtatgtgtattgttgattatttaaaaaaaaatttttaagttgatgaaattgatatattattgggatattaaggggtaagatggtttatttttgttattttagtattttgggaggttgagataggaggattatttgagtttaggattttaagattagtttgggtaatatagtgagattttatttttataaaaaatataaaaattagttgggtttggtggtatgtgtttataattttagttatttaggaggttgaggtgggaggattatttgagtttaggaggttaaggttgtagggaataatgattgtattattgtattatagtttgggtgatagagtaagatttggtttttaagatagtttaaaaaaaaaaaaaaaaaaaaaaaggtttttaggattttattgtaatagtatttttttttttttagatggtaaaatatttttgttttgaattgtttgaaaagaaatgaggagtgtgatttttatttttagttttttttattaggtttttgatttttttgttgtttgggtgttgtggggtaaagggtgatttttttaatgttttttatttatgtaggatttaaagttatttgttattttgttataaaagtttattgtgagggaagtggttaatgaggagaaagtgatgtttttgattagtgtttttttgtaagggttggagatgtatgaaatttatatgagttttaaagaggataggaatgtttggatggtttatatttaaagggttgtggagaggtgaggagggtttgggggtttttttatttattgtgttttttttgttgattggtttatttttggttttgattgttggttattagttgtgattttgaatttttttattttagtttgggatttatgatgttattttagttttttttgatgatttaatttgttggatgttgaggttaatgggtttagaaaggtagttgtaatttgggtttttttgtatgtgtgggttattgtatttgttatggtgggttttttgtattttagggttagatttgttggagtagggtatggtattttgttttttttttttgggttgagtattttttagggtttagaattagttggttttttttttttttttttattttttatttttttgagatagagttttgttttgttatttaggttggagtgtagtgatgtaattttggtttattgtagtttttgttttttaggtttaaatgattttgttgttttagtttttttgagtagttgggattataggtgtgagttattgtgtttagtttattttgttttgttttgttttgttttttagagtttggtttttgttttattatttaggttggagtgtgttggtataattatagtttattgtaatttaaatttttgggtttaagttattttatttttttggttttttaagtagtttgaattataggtatatattattatatttagttagattttttatttttgtagagatggggttttattgtgttgtttaggttggttttgaatttttggttttaagttatttttttgttttggttttttaaagtgttgggattataggtgtgagttattatgtttgtttatttttttttttgatttttggaggttttttggtgttttaatttggtttagatttttttatttatagtagttgtagttttatggggtttgtagttatttatttgtatttggtaggttttttgtaagtttgttgttttttggattttttttttaagttataggtaggtatgtaaagtttttttttggttatgttttggtgttttggggtgggatgaatgttagtggttttttttttttttttttttgtttttttgtattatgaataagttaaattatttttaaagttagagatggttgtggtggttggttttgtagaattagtgtttgtgttgaggttggtttgtttgggaagtatagttatttatttgatttttttttttgtagttgttttgatgaggaggaggggttttttagtttgtttgaagaggaaaggaaggtggttgaggtttgtgttatgagattttgggatttttaaggtgagtgggagatagtgtttgggtatattttttgtgtggtgagttttgggttttttattaggattggttatagagggtgaattgttttttaggtgatttggtgtttttttgtgggttgtgttatgttttgtagttttgtgaagtattagaatgggttgtgttatgatatagtgatttttagaggttatttagttttttgggggtatgtgggagagggagggaggagagtttagaggatttgagttttttttagagttgattatatagttatatatgttattattattttatttttgtgtagttaggagtttaatagggtattttagttttatatgaaggaatagtatagggtttttatagtttttttttagagtttttttttttttgtttaattatatgattgagatgtaatttatatattatagtatttatttttttaagtgtggggtttaggggtattttagtgtatttttaattatgtagttagaattatgttaattttagaatattttattattttagaaagaagttttgttttttttaatagttattttttattttatgttttaattttggtaataggaatttattttttgtttttgtagattggtttgttttggatattttatataaatggagttatattgtgtggttttttgggtttggttttttttgaggtgtggtattaaggtttgtttgtgtttagtgagtattttgttaagaataatttttggtgttttgtagtttgtggtaagtttttttttttttttttattgtttgtatttttttttattttatttttttttttttttttaaatagagttttgttttgttattaggttggaatgtagtggtgtgattttggtttattgtaagttttgtttattaggtttaagagattttttttttttagttttttgagtagttgggattataggtatttgttattatgttttattaatttttgtgtttttagtagagatggggttttattatgttggttaggatggttttaattttttgattttgtgatttgtttgttttggttttttaaagtgttgggattataggtgtgagttattgtttttggttttgtattatttatttttaaattggataatatttaaataataagtggtttggtatggtggtttatgtttgtaatttttgtattttgggaggttgaggtagatggattattggaagttaggagtttgagattagtttggataatatggtaaaattttgtttttataaaaaatttaaaaattaggttgggtgtggtggtttatgtttgtaattttagtattttgggaggttaaagtaggtggattatttgagattaggagtttgagattagtttggttaagatggtaaaattttgtttttattaaaaatataaaaaattagttaggtatggtggtgtgtgtttatagttttagttatttgggaggttgaggtaggagaattgtttgaatttgggaggtggaggttgtagtgagttgagattgtgttattgtattttagtttgggtgatagagtgagatttttttttaaaagaagaaggaaggaaagaaagaaagggaggatggaaaatttagttttttaaggttttaagttggttttagattaataaatgggtttgatataatttttatttatattttattgtgtttgattttattttattttttttagagataggattttgttttgttggttaggttggagtatagtattgtagttatagtttattgtagttttgaatttttgggtttaagtgatttttttgttttattttttaggtatgtattattataattagttaattttttatttgtagagatagagttttattatgttgtttaggttggttttgaattttaggttgtaagagtttttttattttggtttttttaagtattgggattgtaggtttgagttattatagttaatttgatttttataataagggggaaaataattagaggataaggttatgtttttttttattttttaggaatgtaggatataagggggtagtttattttagggtagggttagtggggttttttatttttaggttagtttttggggtttagatgattttagggaaggttgatttggttgattgttatttttattattattttgtagagtggttgagtatgaaagattagttgattgtatagagttttttagagaaatagtagatttatttggagatggttgagatgggtggttttgaagatttgttttagttttgaggtttattttgtggaggggatttatttgagattttgtagggggagttaatttttaagttggttatgagtgagagtaagttggttgtttatattttaagggtgtagttttgttggggtgggttttttagggaattttaggttaggtttatggtttattgtggttgatatggtattttgtttaggataggtttttatgtggggggggtttaggagtagtattgattgttttttggtgtttgtgagagttagaagggttttagatataatttgggttaagttgttttttgtagatataaagtattttttttttgtttaataattgttttgatgttttttgtatgtagaggttttaagttgggttgtggggaggatttgaagttgattaagattggttttttatttattagaggttttttttttttttgggaggtgggttttggtgatatttttagaaaaatatatgtatatttttttagtgggtttttatgtatagttttaatatagttgttaggtttttgggttggttgtttgagtaggtagttagtgtttagtttgttttttttttttttttttttttttttttttttttttttgagatggagttttgttttgttatttaggttggagtgtagtggtgtgattttggtttattgtaatttttattttttgggtttaagtaattttgttttagttttttgggtagttgggattataggtatttattattatgtttagttaatttttgtattttttgtagagatggggttttattatgttggttaggttggttttgaatttttgattttagatgatttatttttttttgttttttaaggtgttgggattataggtgtgagttattgtgttttgttttaatttgtttttttaatagtgagggaagttgatttagtttttgttttttagagtttttttgtagaataagatggtagagatgggggttagtttttttttttttaggtttattgatatttttttatttggttttagtggttattgtttttggttttttggggatatttttatattttgtattttggtttggaatgtttttgtttttatttttgtgtttggttatagtttgttggttttagagggttttttgtagatagtttttttttataaagttatttttttatatggttattgttatataattagtgtatggttattgttatataatatattaagtgttttttgttggttttgggtagggttatatttagtatttgttagtttttggtttagggtggtttggtggaaggagttgtaggagtttgtatttgttttttttatggttgttttatagttttgtttttttatttagatgtagattggtttgttttggtggttatatttgaagtaagggtgtgtgtagggatagtggggttgaaattttatggtatatagaagggggtaggtgattattattttagtgagtttttttgtttatttgggttttgttgttttagtgttttgtatttttttagtatatttttgtagggtgatttgtgttttttgtttttttttttttatagttgagggtatttagagtttgatttgtaggtagttgggtagtgttaatggttaggtggaagatggaggtagttttataggtttgtttaggagggttgagatttttgtgggttatgattgtataaatagttttattaagagtaagagtggggttgtttttttttttgtttttagggttgttttttaggatgtatattaatttgtatggggttttttagaatttttttttttgttgttgttgagatagagttttgttttgttatttaggttggagtgtagtggtgtaattttagttttttgtaatttttgttttttgggtttaagtgatttttttgttttagtttattaagtagttgggattataagtatatgttattatgtttggttattttttgtatttttagtagaaatggggttttattatgttggttaggttggttttgaatttttgattttaggtgatttgtttgttttagttttttaaagtgttgagattgtaggtgtgagttattgtatttagttgattttttggaattttttgaaattttttagatattgttggttgtgttgtgatagtagtatttagattagtttgtttttttttagtaggtgtttgtgttgtagatgttattatttgggtttagtttgggttttttatttgggtaggggttgggggtggattgggaagtttttttttttttatgggatggtagtatttttatgtttttggtttggggtttttagatggtagttttaagaagaaagttagtagtattgattttaggttttgagattggtgaggttttttaaatagtttggatttgaagtttagtgatagtgatatttttgggagttttgaggaattgttgtaggtggtatgtggatatttatttgtttggtatagtttgagttgttataaggatttatgtgtgtgagtagtttttgttggggttgtttagttttagttttattagtattgataagtattgtttgttttgtggtgaataatagtattttagtttagattaatgtattggtaggtgatttttttttgtagttttttgggaaaagtaaagaggtttttaagaggaaggttggggaggggataggtttagggtatttattatggttttattaataggtgaggaattttttatagggattattagtttttagttggggtaggtgtggtggtgtttattagatgttagatgtttttggttatttttttgtttttgaattagaaggttaggtgtttatttggttttgtttaggttagggggttagaggttaaggttagttgtttttgattagttttgaggtttggatttgtttttgtggttagagttggtatgtaggttttatagttaagtttattttattttttaggaggttttagttttttgttttttaaatatttagatttgtataagttagttgattagtagggtttgtgtttttagttatgatttggttttgggttttttttgttatttatattaagggatgtatttttaataataagtaggggttgggtgtagtgttttatatttataattttagtgttttgggagattgaggtgggaggattattttttttttttttttttggagataaggttttattttgttatttaggtttgagggtagtggtgtgattatagtttatatagtttttaatttttaggtttaagtaatttttttattttagttttttaagtagttgaaattataggtgtgtgtttttatatttgattaattttttaaatgtttggtagatatagggttttattatgttgtttaggttggtttttaatttttgggtttaagtaatttttttgtttgggttttttaaagtgttgggattataggtaaggttgttatatttggttttgggaggattatttgaggttatgagtttgagattagtttgggtaatatagtaagattatatgttgataaaatatttttaaaatagttgattttttggttgggtgtggtggtttatgtttgtaattttagtattttaggaggttgatttgggtgattatttgagtttagggtttgagattagtttggttaatatggtgaaattttgtttttattaaaaatataaaaattagttggatgtggtggtggatatttgtaattttagttatttaggaggttaaggtgggagaattgtttgaatttaggaggtggaggttgtagtgagttgagattgtattattgtattttagtttgggtgattaagtaagattttgttttaaaaaagttaaaaatagttgttgggtgtggtggtttatgtttgtaattttagtattttgggaagttaaggtaggtggattatttgaggttaggaatttgagattagtttgattaatatggtgaaattttgtttttattaaatatataaaattagttaggtgtggtggtatatttgagtaattttagttatttgggaggttgaggtaggagaattatttgaattaggaaggtggtggttttagtgagttgagattgtgttattgtattttagtttgggtaatgagtaaaattttattttaaaaaaaaaaaaaaaaaaaattaaaaatagttgattttggtggtgtatatttgtagttttagttatttaggaggttgaggtgggaggattaggttattatattttagagtaaggttttgttttaaaaaaaaaaaaaagaagttaggtatggtggtttatgtttgtaattttagtattttgggaggttgaggtgggtggattatttgaggttaggagtttgtaattagtttggttaatatggtgaaattttgtttttattaaaaatatataaaattagttaggtgtggaggtttgagtttataattttaattatttgggaggttgaggtaggagaattgtttgaatttgggagttggagggtgtagtgagttaagattgtgttattgtattttagtttgggtaataagagtagaattttgttttaaaaaaaaaaaaaaaaaaaaaagttaaaaaaaaagaagaagaagaagaaggtttgagtttagttggatgggttttgagttattttttttggtttgatggtgttttttttttaggtggaggtgttaggtatggaatttgatttttgtttgtttattgttttggagttggaggtaggtgtttgtgggtttttatttttttagggttttgtgtatgtgtgtgtggttttagtttgataattagtattaattttttttttttttttgtagtttgtttagtggatttagatattgttttagttgtttttgaatttttaggtataggggtggggtggggttggttatgtgtgtttttttttggttggttggggtgtaggtgtggtttttatttgtttggttttggttttttgtaggtggtaattgtttattaggatagttatgtggagatgtagtgggttgttatttaggagtgggagaagtagttttggttgtagttgatgtgtgggaatttgttgttggagtaggagtggtaatgtaattttgagaagtagtgggaggagtgtgtggttttggagaagttgtagagttagttgtggtatgagtagtagtgttgggagtgtgagtgttagtggtagtattaggagttggagtgtgtgggtgtgtggttgtaggagtgtgagggtgaggtgtggtagttatgtgagtggttggagtaggagtgggttgagttggagtgttagtgttaggtttattagtatgatttggagtggttgtgtgaggtttagtgtgttgtggagtgtgagtgggagtgtttggagttgttgtgttgttttaagaagtagaatattgtgttaggtgtgttgttgtttgatatattggttgaggtgagtgtgtagtagttagtgtgtgtaggttgggggtgattggtttgtatgtgtatttgtatgagtgtatgtaggtgatagggtttgtgggtgtatgtgtgtaggagtgtaagagtaaatggtataagatatttttgtattaatagtttatgttgtagtatagattttttttggagttggttaaatgtttaatagaatgttgttgtttaaaatatgttataaatgttagaaattttttaaaaaaaaaatgtatttttgtaattttagtattttgggtggtggaggtaggtggattgtttgagggtaggagttttaggttagtttgggtaatatggtgaaattttatttttataaaaaaatataaaaatgagttaggtatggtggtatgtatttgtggtttttgttatttggaatgttgaggtgggaggattatttgagtttgggagaatgaggttgttatgagttgtgattatgttattgtattttagtttgggtaatagagtgagatatgagttgtgattatgttattgtattttagtttgggtaatagagtgagattttgttttaaaaaaaaaaaaaaaatgaagttgggtgttatggtgtgtattttagttatttgggaggttgaggttggaggattgtttgaggttaggtatttgagattagtttgggttatgtagtgagattttatttttaaaaaaaaaatgtaaaaattagtagggtgtggtggtatatatttgtaatttaaattatttgggaggttgaggtagggggattatttgagtttaagaggtttaagagttatgattgtgttattgtattttagtttgggtgatagagtaagattgtgtttttgaaaataaatttataaattatgggttttgtgaatagatgtggatatggatgtgtgagatgtttgtatatgagtgtgtgatagtatgggtgttattgagtgttattataagtttgtatatttagtaggggttggggatgggtaatgattagtagtttttttaggttgtatttggttttgtttagaataggagaggttgagggttttttgtgtatgatttttgggggttttttagaggttgtatagtaggaattttatattggatgtatttgttgttgtttttttaggtttagtttttaagttatttttttagttttaatggggaagggttggagggtttttgtgtgagtatgttgttatttggtgtggggttagagtatgtagagtgttttgaggtggtttgttgggatagtgtttttattgagaattggttggttaagagtgatgtgtttatttagttgtttagtgttattaattagttttagaggtaggtggttgtgtagtagtagatttttattaagttggtggtttttattaagggtggtaaggataagggtggtaagagtaggggtttttagtgttgggagagtttaggtgagttggttttatttttttgtttgggtttggaaggtgtaattggttaggttttagtggtttgttgggagttaggaaatttgggatatttgtgttattttttggagaggaaaattagaaggtatagttggtattgtggttgaggttattttatatagggttgtgtttggtttttaggtttaaaattgagatgatttattttgtattttttttattttaatttttaaaatagtgggatggggattaggagttttagaaagggatatgggtaagaaggtagagatttttggttatgtgggattagtatagttgggatagggataggtgtaggtgtttttgtttattgttttagttttatagagttgttttatagagtgggatatggagtttagagtagttttagtgtttttatggaggatgtttaggagtttttttgggggatatttttttgggggataattagggatgttttgggatgttttttgaagattaagggtgtgttttgtggttattagggtttgtgttatttttataggaggtttagttttttttttagatgttgggtgattttgtaggtttttttgtagggaggttggggttgttttttttgaatttggggtttagtatttgagtagtttaggttatgggatttaggttgtttgtgggaagtgttaggtgggggtggttaggtttttttgtttttggaggttgttttggtgggtggggatagttggttagtttggagttggtttaaatatttttttttttttagtgttttttgatttgaagtagtagttgttgtttaataagtttatggggaaagatgagagtattttatggaattgttgtttgttgagttttattttgtttggtagatatagttttgtgtttttattaggtgagtttttattttttgatatgagtttagttttagggtagtggggttgtggtattatttggtgattgtttagtttgaattttttttttgttttagattttggtttttttgttttgagtttattgttagttgatagtttttttgagggttttttttttaaggttgggggtatagtttttttgtttgggtttttagtttttttgttattgttggttatattatttagtgttaaggaggatgttagtaaagaagatgttatttttttttaaaagggttgtgatttaaggtgtaaggtttttttttgttttgtttattttttttgttttttggggatttttatggggttattatgtttatttagttgttttttttttttttttagtaaattattgatgattgtttggtaggggttagtttgttggtgttttgggttttgtagttgtttttgtagggttagtggtggtgttggggttattttttgaattttttttttttttttttaaaaaggaaagtttttaatggaaagttgagttagaattaaattagggagttgtttgaaattatagtattttatttgggtggtggggagattaattttgagttgtttttttgaggtagtgaggaatggtgttggttttgtatggagttgaggataggatagattttgttttgagaaggagttgttggttggggttatgttttatagttgttgtgtgatagtggagttaagggttagggtattaggaggggttaggtggtgttggtagtatttgtttttagaattaggtagaatttattttttaaatagagttttatgtaggtttattatgaattttagggttagggaatgagttaggtatgggggtatgggtagagagggttatggggtagggtttattgagggaatattagtggttttttagttaggttttgtgggtttggaagtttattgtgaaaggggttgatttttgtttttttttatttggtattggttttgaaattagttgttttttaaattttgttttttaagggtaattgttgttgtttatatgtttagtttgtttgggggagtgggtttttagttttagttagggtgggtatatattttgggtatagggtttttagtttttgggaaatgagtttttagggttggtgttttattttttaggtgggggttggtatattatagattgttgagagtgttatgttttagggtatgtagaggatgtatttagagatgttgtagtaagtggataagtggttgttgtgtgggttttttgtttgtagtgagttgttgtagtttatggtttgttttttggaggggtggaggaaggaggtgttgggtagtattaaaggtgttgggatattttagggtggtgagatttatttatgatttagttttggtggagaaagggtttatgttaagttttgttttgtattttaagtattggtggtaggattgggttttggttgattgtttttgtttttagtggggtatatgtgagtttttgttagggttaagttttttttttgaatttagggttttgggaattgtagattttggggggatttagttttttttttattgtgttggtagaggtatttttgtgatgttgaatatagtgaatagggatatttttgttatttggggatagatgggtataagggaggggaaattttattaggaagtgtttttttgggtagaggtgtttattgggtgttgtgggtttaggagggggtggggtaggagttggtgttaattgggaattagagttttatagttatatagtttattggtgataaggttttgagaatatagtggttaggtgtttttaggtttttggtttttttgatgattttaattttgtttagtttggtttttggttattagtgatgttgtttgttttttgttagattttatgtgtgttatgtttattattagtgttttgtatttttgtattgagtattggagtattttatagaagttgattgtatatttttgttttgttgtgaagagaatatttttagattttggtatttttttgagttggtgtgtgttggtttagttttttgagatgttataattttttggatgggggagaagtttaaggaatttttgtttggttatgtggtgggaattttgtgtttttgttatgtggtagaggggttttagttgtgttaggtattgggtggtagtgttgatagttttttttttgttagtgttttttggttatttttgggttggagtttgattttatttgtaaagttgatagttgagtaaatgtttttatttttgtgggatttgtatatgtttttgttagttgtggttatgattttagttatttgttaattatttttataatgattataatatttttttattgtgggatatttttgatttgttttagaatttaagatttgattttagtaataaatgtgtttgagatgagtggtgattggtgtgtatgtttttggaggttttatttgaggatttttttttgtttaaatgttgttgtaggagtagtaggttttgttgggggttttttatggtttttgttttttagtttgtttatttgttttttgtgttttgtttaatgttttgaagatttttttaggtttagtttttaggagttgttgggggttttgtttttgtttttgtttttgtttttttggtttgtttgtttttttgagatagagttttgttttgttgtttaggttggagattagtggtaggtttttagtttattgtaatttttgttttttgggtttaagtattttttttgttttagttttttgagtagttgggattataggtgtgtattattatgtttagttaatttttgtatttttttagtagatatggggttttgttatgttggtgaggttggttttgaatttttgattttaagtgatttgtttgttttagttttttaaagtgttgggattatgggtatagggtaggagtggggtgtggaggtgtttgtggagggttttgtttattgggtatattttaggttttggtggtgtttttatgaaaatttttttgtttttaatttataataattgtaaaggttggaatttttattttttttatttggggtgagaggtagtttggttatgagtatgaaattattatttttatttggtttgagttttggtttagtgaggtgaggattttgttgttttaatagagggttttttattataaggggattaggtgtaaagttgattattagtttattaggaagtgtaaaaagggaatttttaggtagtattgtttattaggaagatgatgtaggttatgtgtggaattttttatttttagtagttatattaaaaaagtaaaaggagggttgggtatagtggtttatttttgtaattttagtattttggggaggtgggggttgaggtaggaggatagtttgagtttaggagtttaagattagtttgggtaatatagtgaaatttttttatagaaaaattaaaaaattagttaggttggttgggtgtagtggtttatgtgtgtaattttagtattttgggaagttaaggtgggtagattatgaggttaggagattgagatt

SEQ ID NO: 244 - DNA, 18463 bp, Artificial Sequence
  chemically treated genomic DNA (Homo sapiens)
ggttttgattttttgattttgtaatttgtttattttggttttttaaagtgttgggattatatgtgtgagttattgtgtttggttaatttggttaattttttaatttttttgtgaaggggttttattatgttgtttaggttggttttgaatttttgggtttaagttatttttttgttttagtttttgtttttttaaaatgttgggattatagggatgagttattgtgtttggttttttttttatttttttaatatggttattaaaaatgaaaaattttatatgtggtttgtattatttttttggtggatagtgttgtttgagagttttttttttgtgttttttagtgagttagtgattgattttatatttagtttttttgtgatgggaaattttttgttgaaatagtagggtttttgttttattggattgggatttagattaggtggaaatgatgattttatatttatggttaagttgttttttattttagatggaggaagtgaaagttttagtttttgtggttattgtggattaaaagtaaaaagatttttgtggaggtgttattaaagtttgaagtgtatttggtgggtaggattttttataggtatttttatgttttatttttgttttgtgtttgtaattttagtattttgggaggttgaggtgggtagattatttgaggttaggagtttgagattagttttgttaatatggtgaaattttatgtttattaaaaaaatataaaaattagttgggtgtggtggtgtatatttgtaattttagttatttaggaggttgaggtaggagaagtgtttgaatttgggaggtagaggttgtagtgagttgagaatttgttattggtttttagtttgggtgatagagtaagattttgttttaaaaaaataaataaattaaaaaaatagaaataaaaataaaaataaaatttttaataatttttggggattggatttgaaggggtttttagagtgttaagtaggatatggagggtaggtgagtgagttgaggggtaggagttatggggagtttttaatagaatttgttatttttgtagtaatgtttgggtagaagaaaatttttaaataaaatttttaagaatgtgtatgttagttattgtttattttggatatgtttattgttagaattaggttttaagttttaaagtgggttagaaatattttgtagtgaggaaatgttgtaattattgtaaaaataattagtaggtgattaagattatgattataattgataaagatgtgtgtagattttatgaaaataggaatatttgtttgattgttaattttataaataaaattgggttttaatttaggagtggttgaggggtattggtgagggaagggttgttggtgttgttgtttgatgtttagtatgattgagatttttttgttatatggtggggatgtggggtttttattgtgtggttgagtagaaattttttgaattttttttttatttaaggaattgtggtattttggagggttggattggtatatgttggtttaggagggtgttagggtttgggaatgttttttttataatagaataggaatgtatagttagtttttgtaaagtgttttgatatttagtataaaaatataaaatattgatgataaatatggtatatatgggatttgatggggggtggatagtgttgttgatggttagggattgggttgggtagagttgaggttgttggaggggttaggagtttggggatatttggttattgtgtttttaggattttgttattaatgggttgtatggttgtggggttttggtttttggttggtattagtttttgttttgtttttttttgagtttatagtatttagtgggtgtttttgtttaggggagtattttttgatggagtttttttttttttgtgtttatttgtttttgagtggtgggaatgtttttgtttattgtatttagtgttataggagtgtttttgttagtatagtgggagaagggttgaatttttttgggatttgtagtttttaggattttgggtttgggagaaggatttggttttggtaggggtttatatgtattttattgggaataaggatgattagttaggatttagttttattattaatgtttggggtgtagaataaggtttgatatgggttttttttttattggagttggattgtggatggattttattattttgggatgttttagtatttttgatgttgtttaatattttttttttttatttttttagggaatggattgtaagttgtaatagtttattataagtgaggggtttgtatagtggttatttgtttatttgttgtaatgtttttaggtgtattttttgtatgttttgggatatggtgtttttgatagtttgtgatgtgttagtttttatttggaaggtgggatgttagttttgggagtttattttttgggggttgaggattttgtgtttagggtgtgtatttgttttggttgaagttagaggtttgtttttttagataggttgagtgtgtgaatagtaatggttgtttttgggaagtagagtttgggaaatagttggttttaaaattaatgttaagtaaaaaggggtaaaggttagttttttttatgatgggtttttaaatttatagaatttgattggagggttattgatgtttttttagtgggttttgttttgtggttttttttgtttatgtttttgtgtttggtttattttttgattttgaggtttatggtgaatttgtgtggggttttgtttgggaagtggattttgtttgattttggggatagatgttgttgatgttatttggttttttttggtgttttaatttttggttttattgttgtgtggtggttgtggagtgtggttttggttggtagtttttttttaaagtaaggtttgttttgtttttagttttgtgtagagttggtattgttttttattgttttggaaaaatagtttggagttgatttttttgttatttggatggggtgttatgattttagatagttttttggtttagttttggtttaattttttattaaaaatttttttttttgaaaaaaaaaaaaagagatttagaaagtgattttggtattattgttaattttatagaaatagttgtaaggtttagagtattgataggttggtttttgttaggtggttattagtggtttgttagggaagaggaggggatagttgggtgggtatggtgattttatgggggtttttagagagtaggaagggtgggtagggtagggaggggttttgtattttgagttatggtttttttagaagaagatgatgttttttttgttggtgttttttttggtgttgagtggtgtggttggtagtggtgagggagttgggggtttgggtaggagggttgtgtttttggttttgagagagaagtttttggaggggttgttagttggtggtgggtttggggtggggaagttagggtttggaatagagagagggtttagattgagtagttgttgggtggtgttgtagttttgttgttttgggattgggtttatgttagggggtgggggtttatttggtgggggtgtaggattgtgtttgttgggtaggatagggtttagtgagtggtggttttgtgaggtgtttttatttttttttatgagtttgttgagtagtagttgttgttttaggttgaaggatgttggaagagagaaggtatttgggttagttttaggttggttagttgtttttatttgttagggtagtttttgagagtagaggggtttggttatttttatttgatattttttatgggtggtttggattttgtgatttgagttgtttagatgttaagttttagatttagggagaatggttttaatttttttgtggaaggatttgtagagttatttggtatttggagaggaggttgagttttttgtggaaatagtataggttttagtgattatgggatatatttttaatttttagagaatattttagaatatttttggttgttttttagggaggtgttttttagaggagtttttggatattttttgtggaaatattggggttgttttgggttttgtgttttattttgtggaatggttttgtggaattgggataatgagtagaggtgtttgtatttgtttttgttttggttgtgttgattttatgtggttagggatttttgtttttttgtttgtgtttttttttaaggtttttggtttttattttattgttttgagggttgaggtggagaagatgtagggtggattattttagttttgggtttggagattaaatatggttttgtgtggggtggttttagttatgatgttagttgtgttttttggtttttttttttagaggatggtataggtgttttgaattttttggtttttagtgagttgttagagtttgattagttgtattttttaggtttaggtgaaggggtggggttggtttatttgagtttttttagtgttgagagtttttgtttttgttgtttttgtttttgttatttttggtggaggttgttagtttggtggggatttgttgttgtatggttgtttgtttttggaattggttggtggtgttgagtagttggatgggtatattgtttttggttagttggtttttggtgggggtgttgttttggtgagttattttggggtgttttgtgtattttggttttatgttggatggtagtatgtttatatgagggttttttagtttttttttgttgaagttgggagggtggtttgggggttgggtttgaggggataatagtagatatatttaatgtgaggtttttgttgtgtggtttttggagagtttttgagggttgtgtataggagatttttgattttttttgttttggatagagttaggtgtagtttgaaggagttgttggttattgtttgtttttaatttttgttaaatgtgtagatttgtggtgatatttagtggtatttatattgttatatatttatatataaatattttatatatttgtgtttatatttgtttatagaatttatggtttatagatttgtttttagagatatggttttgttttgttatttaggttagaatgtagtggtataattatagtttttgagttttttgggtttaaatgatttttttgttttagttttttaagtagtttggattataggtatgtgttattatgttttgttaatttttgtattttttttttagagatgaggttttattatgtggtttaggttggttttaaatatttagttttaagtaattttttggttttagttttttgagtagttagggtgtatattatggtatttagttttattttttttttttttttgagatggggttttattttgttgtttaggttggagtgtagtggtatgattatggtttatgttttattttgttgtttaggttggagtgtagtggtgtgattatggtttatggtagttttatttttttgggtttaagtgatttttttattttagtattttaagtagtggggattataggtgtatgttattatgtttagtttatttttgtatttttttgtagagatggagttttgttatgttatttaggttggtttggaatttttgtttttaagtaatttgtttgtttttattatttaaagtgttgggattataggagtgtattttttttttaagaagtttttaatatttatggtatgttttgagtaatagtgttttgttaagtatttagttagttttgagaaaggtttgtattgtggtatgagttgttaatgtaagggtattttgtgttgtttgtttttatatttttgtatgtatgtatttgtgaattttgttatttgtatgtatttgtgtaaatgtatgtgtaaattggttatttttaatttgtgtatattggttgttgtgtgtttattttggttagtgtgttgggtggtagtgtgtttggtgtggtgttttgttttttgaggtggtgtagtagttttaggtgtttttgtttgtgttttatggtatgttgggttttgtgtagttgttttaggttgtgttggtaggtttggtgttggtgttttagtttggtttgtttttgttttagttgtttgtgtagttgttgtgttttgtttttgtgtttttgtagttgtgtgtttgtatgttttagtttttggtgttgttattggtgtttgtgtttttagtgttgttgtttgtgttgtagttggttttgtagtttttttagggttgtgtgttttttttgttgttttttgaagttgtgttgttgtttttgttttagtagtaggtttttatgtgttgattgtagttggaattgttttttttgtttttggatggtagtttgttgtgtttttatatagttgttttggtgggtgattattgtttgtggagggttagggttaggtgagtgagagttgtatttgtgttttagttaattaggaaagggtatgtgtggttggttttattttgtttttgtatttgaaggtttaggagtagttgggatagtgtttggatttgttggataagttgtggagaggagagggagattgatgttagttattgggttgaggttatatgtgtgtgtataaggttttggggagatggagatttgtgggtgtttatttttgattttaggatggtgggtagatggggattggattttgtgtttggtgtttttatttgggaagaggatattgttaaattagagagagtggtttaagatttatttgattagatttaagttttttttttttttttttttttttttaatttttttttttttttttttttttgagatggaattttgtttttgttgtttaagttggagtgtagtggtgtgattttggtttattgtattttttagtttttgggtttaagtaatttttttgttttaattttttgagtaattgggattataggtttaagtttttatgtttggttaattttgtgtatttttagtagaaatggagttttattatgttggttaggttggttgtaaatttttgattttaggtgatttgtttgttttggttttttaaagtgttgggattataggtatgagttattatgtttggttttttttttttttttttgagatagggttttgttttagagtgtagtggtttgatttttttattttggttttttgagtagttgggattataggtgtgtattattaggattagttatttttaattttttttttttttttttttgagatggagttttgtttgttgtttaggttggagtgtaatggtatgattttagtttattgaaattattatttttttggtttaagtgatttttttgttttagttttttaaatagttgggattatttgaatgtgttattatgtttggttaattttgtatatttggtagaggtggggttttattatgttggttaggttggttttgaatttttgattttaggtgatttatttgttttggttttttaaagtgttgggattataggtgtgagttattatatttagtagttatttttaatttttttgaaataaagttttgtttggttgtttaggttagagtgtagtggtgtaattttggtttattgtaatttttattttttaggtttaagtgatttttttattttagttttttgagtagttgggattataggtatttattattatgtttagttaatttttatatttttagtagagatagggttttattatgttggttaggttggttttaaattttggatttaagtgattatttgagttggttttttgaagtgttgggattataggtatgagttattgtatttagttaaaggattagttattttaaaaatattttgttgatatgtggttttgttatgttgtttaggttggttttaaatttatggttttaagtgatttttttaaggttaggtatggtggttttgtttataattttaatattttgggaggtttaggtaggaggattgtttgagtttaggagttggaaattagtttgggtaatatagtgagattttgtatttattaaatatttaaaaaattagttaggtgtgggggtgtgtatttgtagttttagttatttgggaggttgaggtgggaggattgtttgagtttaggagttagaggttgtgtgagttgtgattatgttattgtttttaagtttgggtgatagagtgagattttgtttttaaaaaaaaaaaaaaaaagtgatttttttattttggttttttaaaatattgggattatgggtgtgaggtattgtatttggtttttgtttattattgaaaatatattttttagtgtggataataggaaggatttaggattgggttatgattgggaatataggttttgttggttagttgatttgtataaatttgggtgtttggaaaatgaggggttggggttttttgggaggtagagtgggtttggttatgaggtttgtgtgttagttttggttataggggtaagtttaagttttagaattgattagaggtaattggttttggtttttgattttttgatttgggtagggttgagtaggtatttggttttttgatttaaaggtaaaggaatagttggggatatttggtatttggtaggtattattatatttgttttggttgaaagttggtggtttttgtagggggttttttgtttgttgatgaagttatggtgagtgttttgagtttgttttttttttagttttttttttggggatttttttgttttttttaggaggttgtaggaagaaattatttgttagtgtattaatttgggttgagatattgttatttattataaaataaataatgtttgttgatgttaataagattaaaattggataattttagtagaagttgtttatatatatgaatttttatgatgatttagattgtattgagtaaatggatatttatgtattatttgtggtgattttttagagtttttaggaatgttattgttattgagttttaagtttgggttgtttggggggttttgttagttttggggtttggggttagtgttgttgattttttttttgaaattgttatttgagaattttaagttaggggtatgaggatgttgttattttgtggggagggggaagttttttagtttatttttagtttttgtttaggtaggaaatttaggttaggtttgaatggtggtgtttgtagtatagatgtttgttggagaggggtaggttggtttgggtgttgttgttataatataattaatgatgtttggagggttttagaaggttttagaaaattggttgggtgtggtggtttatatttgtaattttagtattttgggaggttgaggtgggtggattatttgaagttaggagtttgagattagtttggttaatatggtgaaattttatttttattaaaaatataaaaagtagttgggtatggtggtgtgtgtttatagttttagttatttggtaggttgaggtgggagaattatttgaatttaggaggtagaggttgtagagagttgagattgtgttattgtattttagtttgggtgatagagtaagattttgttttaataataataaaaaagaaagttttaggaaattttatataagttaatgtgtattttgaggggtggttttggaggtaggaggggagatggttttgtttttatttttggtggggttgtttgtgtagttgtagtttgtgaaggttttagtttttttgggtgggtttgtggagttgtttttgttttttgtttggttgttggtgttgtttagttgtttgtagattaggttttggatgtttttgattgtggaaggaaggggataggaggtatgggttgttttgtggaagtgtgttgggggaatatggagtgttggggtagtgagatttgggtggatggagggatttattggggtggtgattgtttgtttttttttgtgtgttgtgggattttagttttattgtttttgtgtatatttttattttaggtatggttattaggataggttaatttgtgtttaagtgagaggatagggttgtggggtagttatggggagggtgggtataggtttttgtagttttttttattaggttgttttgggttaggggttggtgaatgttggatgtggttttgtttagggttagtaggaaatatttggtgtgttatatgataatgattatatattgattgtgtgataatggttatatgggagagtgattttgtggggaagggttgtttatagaaagttttttaggattaataggttgtggttaggtatagaggtggggataagaatattttaggttaaggtgtgggatatgagagtgtttttagggggttaagaataatggttattggagttgggtggaaggatgttagtgggtttggagggagaaagattgatttttgtttttgttgttttattttgtggaaaggttttggaaggtaggggttgagttggttttttttattgttgaaagagtagattgaggtagggtgtggtggtttatgtttataattttagtattttgggaggtagaggagggtggattatttgaggttaggagtttgagattagtttggttaatatggtgaaattttatttttatgaaaaatataaaaattagttgggtgtggtggtgggtgtttgtaattttagttatttaggaggttgaggtagaattatttaaatttaggaggtggaggttgtagtgagttgagattatgttattgtattttagtttgggtgataaagtgagattttattttaaaaaaaaaaaaaaaaaagaaaagaaaaaaagaaagagtagattgggtgttgattgtttgtttaagtggttagtttaggggtttggtggttgtgttagagttgtgtgtggggatttattgagggagtgtgtgtgtgtttttttggggatattattaggatttattttttaggaagaagaggaatttttggtaggtagggaattagttttagttaattttagattttttttatggtttggtttagagtttttgtatgtagggagtattagagtggttgttgaatggggagaaagtgttttatgtttgtaaggagtggtttggtttagattatgtttaaggtttttttggtttttataggtattggggggtggttagtgttgtttttgggttttttttatatagaagtttgttttggatagggtgttgtgttggttataatgagttgtgagtttggtttggggttttttgaggagtttattttggtaagattgtatttttgaggtgtgggtagttaatttatttttgtttatggttgatttgagaattagttttttttgtagggttttggatgggttttttttatggaataggttttggggttggggtaggtttttgaggttgtttattttggttatttttaggtagatttgttgtttttttaggaggttttgtgtgattagttggttttttatgtttaattgttttgtagagtgatggtggaggtggtagttagttgggttggttttttttggaattatttgagttttggggattggtttaaggatgaggaattttgttggttttgttttgaggtaggttgtttttttgtgttttgtatttttgggaggtaggggagggtatggttttgttttttgattatttttttttttgttataaaaattaggttagttgtggtggtttaggtttgtgattttagtatttagggaagttaaggtaggaggatttttgtggtttggagtttgagattagtttggataatataatgagattttgtttttataaataaaaaattagttggttgtggtggtgtatgtttgggaaatgaggtaggaggattgtttgagtttaggagtttaaggttgtagtgagttatgattgtagtattgtattttagtttggttaataaagtaagattttgtttttaaaagaaataaaataaaattaaatatagtagggtgtgagtgaggattgtattaggtttatttattagtttgggattaatttagagttttagaaaattgaattttttattttttttttttttttttttttttttttttttttgagaaggagttttgttttgttgtttaggttggagtgtagtggtataattttggtttattgtaatttttattttttgggtttaagtgatttttttgttttagttttttgagtagttgggattataggtatgtattattatgtttggttaattttttgtatttttagtagaaatggggttttgttattttggttaggttggttttaaatttttgattttaaatgatttatttgttttggttttttaaagtgttgggattataggtgtgagttattgtatttagtttaatttttaaattttttgtagagatagggttttgttatgttgtttaggttggttttaaatttttggtttttagtgatttatttgttttagttttttaaagtgtagggattataggtatgagttattatattaggttatttattgtttgagtattatttaatttagaaatgaataatatagggttgggagtggtggtttatgtttgtaattttagtattttgggaggttgaggtaggtagattatgaggttgagagattgagattattttggttaatatggtgaaattttatttttattaaaaatataaaaattagtggggtgtggtggtgggtgtttatagttttagttatttgggaggttgagggaggagaattttttggatttgataggtagagtttgtagtaagttgagattatgttattgtattttagtttggtgatagagtgaggttttgtttaaaaaaaaaaaagaagataaaataaaaaaaaatatagatagtgaaagggaagaagggagtttgttgtaggttatagggtattaggaattgtttttgataaagtgtttattgagtgtgggtgaattttaatattatattttgagaggagttagatttaaaaggttgtgtggtgtgattttatttatgtggaatgtttagggtaggttaatttatagggataggaagtagatttttgttgttagggttggggtatggggtggggagtgattgttaagggggatggggtttttttttggggtggtgggatgttttaaagttaatatgattttggttgtataattggaaatgtattgaaatgtttttgaattttatgtttgggagggtgagtgttgtggtgtgtgaattatattttaattgtgtaattaaatagggaggaggaagttttggaaggaggttgtggggattttgtgttatttttttgtatgggattgggatgttttgttgagtttttggttgtatgaggatggggtggtggtggtgtgtgtggttgtgtggttggttttggaaggggtttaggttttttgggttttttttttttttttttttatatatttttaaagggttaagtgatttttggagattgttatgttatggtatagtttgttttaatgttttatagagttgtaggatatggtatagtttatgggaaaatattgggttatttggggggtagtttattttttgtggttagttttgatggagggtttagggtttattatataaggggtgtgtttagatgttgttttttgtttattttgaaagttttggagttttgtggtgtgggttttgattattttttttttttttttgggtaggttgaagggttttttttttttgttagggtagttgtagggagaggagttgggtgggtaattgtgttttttaggtaggttagttttggtatagatgttggttttgtagaattagttgttatgattgtttttgattttgggagtgatttagtttgtttgtggtgtaggaggatgaggaggggaagagagagagttattgatatttattttgttttaaagtgttagggtataattaggaagaggttttatatgtttgtttgtgatttagaggaggagtttaggggatagtgggtttgtagaggatttgttaggtgtaggtgggtggttgtaagttttgtagagttatagttattgtggatgggggagtttgaattagattaaggtattaggaagtttttgggaattaagagagggagtggataggtatggtggtttatgtttgtaattttaatattttgggaggttaagataggaggatggtttgaggttaggagtttaagattagtttgggtaatatagtgaggttttatttttataaaaataaaaaatttagttgggtgtggtggtgtatgtttgtagtttaagttatttgggaggttgagggggtaggatggtttgagtttaggagtttgggttgtaataagttatgattgtgttagtgtattttagtttgggtgatagagtaagagttagattttaaaaaataaaataaaataaaataaaataggttgggtgtagtggtttatgtttgtaattttagttatttggggaggttgaggtagtagaattgtttgaatttgggaggtggaggttgtagtgagttgagattgtattattgtattttagtttgggtgatagagtaagattttgttttaaaaaaataaaaaataaagagagggaggggaagttagttggttttgggttttgaggggtgtttggtttaaggaggaaggataagatgttatgttttgttttaataaatttggttttagaatgtagagagtttgttatggtaggtgtagtggtttatgtatgtagaaaggtttaggttatagttgtttttttgggtttgttggttttaatgtttaataggttgagttattagaaggagttggaatggtgttatgggttttaagttgggatgagggagtttaaggttatagttgatggttaatggttgaagttaagggtggattaattagtggaaggaatatagtgggtggggagatttttaggttttttttatttttttatagttttttggatgtgggttatttaggtgtttttgttttttttggagtttgtgtagattttatatatttttggtttttgtaaggaggtgttgattagaaatattgttttttttttgttggttattttttttatgatgagtttttgtaatgagatgatgggtggttttgagttttgtatgagtagagggtattggggaggttattttttattttatagtatttaaatagtagggaggttaagggtttggtgaggggaattaagagtgggggttatgttttttatttttttttaaataatttaaagtggaaatattttgttatttgggggaaaaaagatattattgtagtgaaattttagaaatttttttttttttttttttttttttaaattattttggaggttaggttttgttttgttatttaggttgtagtgtagtggtgtaattattgttttttgtagttttgattttttgggtttaagtgatttttttattttagttttttgagtagttgggattataggtatgtgttgttaggtttagttaatttttgtattttttgtagagatgggattttattatgttgtttaggttggttttgaagttttaggtttaagtgatttttttattttggttttttaaagtgttgagatgataggagtgagttattttgttttttagtattttgataatgtgttaattttattagtttaaaaatttttttttaaatagttggtaatgtatatatatatgagaaagtttaaaagatataatggtatgtagtatataataatagataaatttatttttgttttgtgttttaggttatttagagttattggtatttttagtttgttatgtattttttaagagataatgtttttatagattagtaaaatgtatattttaattggttagagtgggttatattgtgttttttataaatttatatgaagttttgagttttagtattttagaatgtggttgtttttggagatggggtttttaaagaggtgattaatgtgtgggtgtggtggtttatttttgtaattttagtattttgggaggttgaggtaggtagattatttaaggttaggagtttaagattagtttggttaatatggtgaaattttatttttattaaaaatataaaaagtagttgggtgtggtggtaggtgtttgtaattttagttatttaggaggttgaggtaggagaattatttgaatttgggaggtggaggttgtagtgagttgagattgtgttattgtatattttagtttgggtgatagagtgagattgttttaaaaaaaaaaaaaaaaaaaaaaaaaaagagaggtgattatggtaaaatgagattatatgggtgggtttaaatttaatttgattggtatttttttaataagaggagattagtatagaggtatatatagagggatggttatttgaggatatagagaatagatgagtatatggttgtttataagttaaggggttttagaagaaattaattttgttgatatttttattttggatttttagtttgtagaaatatgagataataaatttatgtggtttaaattatttagtttatggtattttgtttatagtagttttagtaaataaatatattggttaagaatatattagtagttgggtatggtggtgtatgattgtaattttattattttgggaggttaaggtgggaggattatttgaggttagaagatggagattagtttggttaatatggtgaaattttgtttttattaaaaatataaaaaattagttaggtgtggtggtgggtgtttgtaattttagttatgtgggtttggaaaatttataggtgttttttttatgggtagttttagttaattttttaataaggttatagtaagtagggttttttgtttgttttttgtttgtttgttttgtttttttgttttgagatagagttttgttttgttgtttaggtgggagagtagtggtgtagttttgttggagagtagtggtataattttagtttattgtaatttttattttttgggtttaggtgattattttgttttagttttttgagtagttgggattatagatatgggttattatgtttggttaatttttgtatttttagtagaggtgaggttttattatgttggttaggttggattttaatttttgattttaagtgatttgtttattttggttttttaaagtgttgggattatagatgtgagttatagtatttagttgattttttgtttgaagagataggatatatattatagaagtaaagatgtatttttgattttttttttgtagtagtaaaagtatgttggttagtaggatagttaggatatttgggaaaatagtatggaaggatgtattttaaaagttttatagttaggaggttttgttggttatttttgtggatgttattttttaggaaggtgtaagtagtatgatgtttttgtttgggtttagaagttttttttttgttttgtttgtattttttattatttttttaggttttaatttttagtattaatgagtagttggagttttttttaagttttttttgtgtttagagtttaaattagggtttttgtttatgttaggttattgtgtttggtaattttttttgttgtaataatatttgttgggtttgatttttgagaatttgatatggtttggttgtgtttttatttatattttattttgaatttttatgtgttgtaagagggatttggtgggaggtaattgaattatgggggtagattttttttatgttgtttttgtgatagtgaatgagttttataagatttgatagttttataagggggagtttttttgtataagttttttttttttttgtttgttgttatttatgtaagatttgatttgttttttttgttttttgttatgattgtgaggtttttttttataggtggaattgtttaagtttattaaatttttttttttggtaagttgtttagttttaggtatgtttttattagtagtatgaatatggattaatataatatttttttttttgatgttttagatgtgaatggagttttttgttttttttgtttttgggttattaggatttgagttatagtagtgatgtaggttaggggtggttttagtttttttgtgttttttagttttttttggtgttttgtttttgtatgaattttttgtgttgtaaggttttttgtatatagatgtaaattttgagttgtgttttaagggtaatgttatttttggggagttgtttttaatatttttgtttaagttagatatgtttttgttaatttttttatattgtagtttgttggtttttttaaagtatgtgttggatttttaattagtttttttgttttttggtttgttttttttttttagtttagtgattgatgttttaaaaggttaggtattaggttttgtttggtggggtgtatttttattatttaatttggtgtttggtaggtagaaggtgttaaatttgtttgtgaaatatatgtttatttaaa

SEQ ID NO: 245 - DNA, 15597 bp, Artificial Sequence
  chemically treated genomic DNA (Homo sapiens)
ttttgttgttggtaatttttttttgaaagtgtaaatgtttttagggagttattaggaatagatgtggatgggtagtttttatttagggtatagttgttatttatttggtttagaattgggaagttggttgggtatagtggtttatgtttgtaattttagtattttgggaggttgaggtgggtaggttatttaaggttaggagtttaagattagtttgatgaatatggtgaaattttatttttattaaaaatataaaaaattagttaggtatggtggtggatatttgtaattttagttatttaggaggttaaggtaggagaattatttgaatttaggaggtagaggttgtagtgagttgagattgtgtttttgtgttttagtttggtaatagagggagatttttttttaaaataataaaataaaaatgaattgtgatgtttatttaagtaggaggtattttttatgtaaaggtatagtgtgttttttggaataggtgtttgggagaattgatttatttatttgttgtgtagttttgttggtgagtagtgtgaattttatagataggttttttagagtttgttttagggatttttatgtgttgttatttagagtggtttaggagggtagtggggttgtgttagattttattgtattgagggagtaagtatataggagaggagatatttaaggtttggagtttatttggtagttgagtttggtattttttttgatagatgttttttatggtaatttgtgtgattttgttttaggattttgttgtttaaagagtggtttgtggggattttgggagtttgggagaaagggtggttttggggttgtattttaggatttgttgtgttttttttttttaattagtttttaggtgatatgtgtgtataggtgatgggtattgttggggtaagtagagttttgggtggggttttttttttttttaggtaaaggaagtgttgttagtttatggtttgtttttttttaagttaaagggattttttttttttttgagatggagttttgttgtattatttaggttggagtgtagtggtgtgattttggtttattgtaatttttgttttttaggtttaagtaattttttgttttagttttttgagtagttgagatgataggtatttgttattatgtttagagaatttttttttgtatttttagtagagatgggttttattattttggttaggttgattttgaatttttgattttgtgatttatttattttggttttttaaagtgttgggattataggtgtgagttattatgtttggtttgggatttttttttaaagttttattttgatagtgaaaaaattattagattagaaattggtgagtatttatttgtgtttagaaatttgtgttttagggttgaaatttttttgtgttttttttaaatatgattttttatgtgtttgagttattttttgttttttttgagatgaaataggttaggatgttggttattatggtaaatgtattttttgtttaagttttttattagtatggatttttgttttattgtgtgtgtttttgtagaagttgaaaggttatttattttagtttttttttgaatatgagaagatttgttgtattgttgatggtttgtgatgtgatttgtttggttttgttgtgaagtttgtgaaagttattgtagatgttttggattagtttttggttgatggtaaattgagtttggatgttagttgggaggaagttttgatattatgatggggggagagatattgtgttagttgttggggagtatttgttagatggtagtagttggttttttagaagttgagttatgggagatatagtaggtttatgagttattttgggagttttatttttttaggtttgtagggattattttgtgtgtttaaaaaagaaataaaaattattattatttgtatgttataaatataaagataaatgattttatgggatgaggattatagagtttattgaaattttattatattggaggatttatttaaaaatatttaaataaggttaggggtagttatttatatttgtaattttagtattttggaggttgaggtaggtggattattttaggttaggagtttaagattagtttgattaatatggtgaaattttatttttattaaaaatataaaaattagttgggtatggtggtatgtatttgtaattttagttattttagaggttgagataggagaattgtttgaatttgggaggtagaggttgtagtgagttgagattgtgtaattatattttagtttgggtgatagaatgagattttgttttaaaataaataaattaataaaatatttgaataataattttgttgggtgtagtggtttatgtttgtaattttagtattttgggaggttgagtagggtgaattatgaggtaaggagattgagattatggtgaaattttatttttattaaaaatataaaaaattagttgagtttggtggtgggtatttagttttagttatttgggaggttgaggtaggagaatggtatgaattttggaggtggagtttgtagtgagttgtgattatattattgtattttagtttgggtaatagagtgagattttgttttaaaaattaataatattaatttttagttggatatagtgatttatatttgtattttagtgttttgggagattgaggtaagaggattgttagagtttgggagtttaagaatagtttgggtaatatagtgaaattttattttttttaaaaaattaaaaaattagttaggtgtggtggagtgtttgtggttttaggtgtttatagagggttgaggtaggaggattatttgagtttaggagttttatgttgtaaggagttatgattataatattgtattttagtttggggattttgtttttagaaaataataaaaataaaaataaataatttttaagttaaatataatgaatataaatttttgaaagattttttatatggggggaaggttttttttatgttgtgtttatttttaaagattttttataagatttgatattaattattagagtttagaaaatagaaagtttagagagtaaaatgaaggtaaaagatttggttaggtatggtggtttatgtttttaattttagtattttggggggttatgttaggaggattgtttgaggttaagagtttaagattagtttgggtaatatagtgagattttatttatattaaaaataaataaataaattagttaagtattgtggtgtatgtttgtggttttagttattttgggaggttgaagtgggagaattgtttgaatttaggaggttgaggttgtaatgatttatgattgtattattgtattatagtttagaggatagagtaagattttgttttaaaaaataaaataaaatagatttttaatttttgtatgaagaagtaggtttttttttggtttttttgttgttgttgttgttgtttttgatataaagttttattttgttatttaggttggagtgtaatggtatgatttgggtttattgtagtttttgttttttgggtttaagtagtttttttgttttagttttttaaatagttgggattataggtgtttgttattaagtttggttaatttttttttttttttttttgatggtgtttttgttgtttaggttggagtgtagtggtgtaattttggtttattttaattttttttttttaggtttaagtaatttttttgttttagttttttgagtagttggaattataggtgtatgttattgtatttagttaatttttgtatttttagtagaggtggggttttattatgttagttaggttagttttgaatttttgattttgtgatttatttgttttggttttttaaagtgttaggattataggtgtaagttattatgtttggttggttttttggggtttgttttgtttttttttgttttttttttttgttttgtatttttattagagatggggttttgttatgttggttaggttggttttaaatttttgattttaagtgatttgatagttttagttttttaaagtgttgggattataggaaggagttattgtgttagtttgaagaagaggtttaaaaagaaaaaattaaaaataaaaaaattattaagtagttattttagttttttttggaaaaagattaaattttaaatatttaataataaataaatgtaataatgaatttttagaaatttgaaaaggtgttgatataagtatttgtttgtttgagttatagaaaagggtagagggtatgaggtgtttggagggtttgagggtagagtttagttgtaatttggttttgttgtttagaggtttggggttttggtaaatgatagtttttttgagtttgtttttttatttgtaaaataggttttttagttttgtgttggagtaattgaaatgagggttaaatgaggaaattatgtgatagatgttagtataatttttgttatgtagaggaggtaaaattattttgaagggttaaaatttgtttttttggttaaaaagggatgtattttttaaagttagaaaaatattttggtttttttttttttttttttttttttttttttttttttttttttttttattttatagttttttttttatgtggagttgaagttggattgtattgttgttattttggtttattgtaatttttttgtttgatttttttgttttagtttgttgaatgtttgtgattgtaggtatgtgttgttatgtttgattggttttggtggagatggggttttgttgtgttggttgggttggtttttagtttttaattgtgagtgatttgttaattttggttttttgaggtgttgggattgtagatggagttttgtttatttagtgtttaatggtgtttaggttggagtgtagtgatgtgattttggtttattataatttatattttttagttgtttgttttggttttttaaagtgttgagattgtagtttttgtttggttgttattttgtttgggaagtgaggagtgtttttgtttggttgtttattgtttgggatgtgaggagtttttttgtttggttgtttagtttggaaagtgaggagtgtttttgtttggttgttattttatttaggaagtgaggagtgtttttttttagttgttattatatttaggaagtgaggagtgtttttgtttggttgtttatagtttgagatgtggggagtgtttttgttttgttgttttatttgggatgtgaggagtgtttttgtttggttgagattttgtttgggaggtgaggagtgtttttgtttggttagttattttgtttgggagggagatgggggggttagttttattatttggttagttgttttgtttgggagggaggtgggggggttagttttttgtttggttagttgttttatttgggagggaggtggggggtgttagttttttgtttggttagttgttttatttgggatgtgaggagtgtttttgtttggtgagattttgtttgggaggtgaggagtgtttttgtttggttgttttgtttgagaagtgaggagattttttgtttggtaattattttgtttgagaagtgaggagtttttttgtttggtagttgttttgtttgagaagtgaggagtttttttgtttggtagttattttatttgggaagtgaggagtgtttttgtttggtagttattttatttgggagggaggtggggggggttagttttttgtttggttagttgttttatttgggagggaggtggggggttagtttttttgtttggttagttgtgttatttgggagggaggtgggggggttagttttttgtttggttagttgttttgtttgggagggaggtgggggggttagttttttgtttagttagttgttttgtttgggaggtgaggggtgtttttgtttggttgtttttattgggaagtgaggagtttttttgtttagttagttgttttgtttgggagggaggtggggggggttagttttttagtttggttagttgttttgtttgggaggtgaggggtgtttttgtttggttgtttttattgggaagtgaggaggttttttgtttggttagttgttttgtttgggagggaggtgggggggttagttttttgtttggttagttgttttgtttgggagggaggtgggggggggttagtttttttgtttggttagttgttttgtttgggaggtgaggggtgtttttgtttggttatttttattgggaagtgaggagtttttttgtttggttattattttgtttgggaggtgtgtttaatagtttattgagaatgggttaggatgataatggtggttttgtggaatagaaaggtgggaaaggtggggaaaagattgagaaattggatggttgttgtgtttgtgtagaaagaagtagatatgggagattttttattttgttttgtattaagaaaaatttttttgttttgggattttgttgatttgtgattttatttttaattttgtgttgtgtttatttagggttaaatggattaagggtggtgtaggatgtgttttgttaaatagatgtttgaaggtagtatgtttgttaagagttattattattttttaattttaagtaattagggatataaatattgtggaaggttgtagggttttttgtttaggaaaattagagatttttgtttatttgtttatttgttgattttttttttattattgttttatgattttgttaaatttttttttgtgagaaatatttaagaatgattaataaaaaaataaattaaaaaaaaaaaaaaagaaaaaaaaaagaaaaatattttggttttggtagttagtttatagtttaggaatttgtttttgatgtattgtgttgatttttttaatttgttttgtatattttgtaaaaggaaaatatatagttttatttttttttattagtagtaagaaagttgttgtggggtatgggttattgtggagtgggaggttgtttttttttaggagaaatatatttttatatgttggttttgatattagtattttgtaattttttgatttttttttagatgttttttttattaaataggatagtttggttttatagtaggagtattataaatttgtagtttttttttagaggtatagttattttatttgtagatggggggtagttttttagagaaatagttattttatttatagattaggggtggttttgtagagaaatggtttttttatttatagatttggggtggtgttagttttagagatatttgagattttggtagtttttaaaaatgtaatagaatagggtaaaagtgtttttttttttgggaatgtatttatggtgttagggatattagagtttagggagttgttgggtagagggataggtttagtttttggtattggagtttttttatttgaaagaggttttttgggtaaagttgtgttttaaagttaggagttatttaggagatataaggggaaattttaatatgtagttgtttgtgtgtttaggaatttttaggttttagagatgttttaaagattatttgatttaatttttattttataaaaaaaaaaaaaaaaaaaaaaaaaaagatttgaggtttagtatggtgtgtgtttgtagttttagttatttagagtttgaggtgggaggattgttggagtttaggggtttagggttagtttgggtaatatagtgagattttatttttaaaaatagaaagtaagtaagaaaattgaggttgggaagtgatagagaatgatatttgtgggaaggttatagggaatgttttgtttttagaatagggatattgtttatttgtgatttattgtatttttgtttattgttttttttaggttttgttatatttttttgttggtaatgtagattgtttttaaaggaaggtttttaattttagggtttaaaagattttattgtttgttttagatatttttgggggtattttagggatattttaggtatagggggaaggtttttttgtttttgagaggaatgaagataaaaggaattaaggtttgtgtgaagttagtttgggagagggggtgtttttttgtagtagggataaggatagaggttgttaggtttttatttaagatggggtttttttgaaatagaggagagtttggaaatttttattttagtggagtttttgtttttttttgtatagggagagggttttgtaggtataggtggaggagaagtataggatttgttttttttggaggggttggtagttgtttttttttttaggaaataggagttgggttgtagggttgttttttgtttttttgagatagggttttattttgttgtttaggttggagtgtagtggtataattatagtttattgtaagttttattttttgggtttaagtgatttttatgttttagttttttaagtgattgggattataggtgtgtattattatgtttggttttagttttgttttggtagagatgaagttttgttatgttgtttaggttggttttaaatgtttgggtttaagggattatttagttttggtttttttgagtgttgggattagaggtgtgggttattgtatttgtgaattgtagttttttgatatataataaggttgtgttgtagtagttgggaggagggaagttttatttagatttttgatggagtgtatgtataataagttaatttttggatgtaggtgtgggttgtggttttgataaggaggtttagtttgtgttttagtggtttttagttagatagggttttgttttaagttaatatttttttttatttggagtttttggtatttttttaaattttttaaattatttagtttaaatttttaaagtgattatagagatttatgatttttatgtggatttataaaattttgtaaagttaatattagggatatttttgaaaattatatttagattgttatttggaaaggaaagaagttttgtttatgttatttttgttgggtgtttaaataagggattaggaggataagaaattatatttgagagaggaaaaggtgggtttggaggtttggggattttttggggttgggatatgggtagggtagatatatttattgagttgttgaaggataggaagagtttgaggattatatttttggagaatagggggtgttgtgttattaggttgatgaagtgttttagggttttttttttggttttgatgaattttttgttagttggaggagtatatggggttattggatagagtttagggtgttggtttttattttttgttttgggtgagtttttaaaattttttttagaggtggtagagggtttagtggttagtagagggtattggttgggtttttagtgttgtttagataatgggtttgaaaaggttgtttagagtaataattttatttttagaggttttttttagttatatatatttgggtttaggagttgttaaggaaaattatagatttgtttgtttttattgggagttttgggaattatgtgagtggttattttaattatttttgttaaagatattttttataatttttttttggtattttttattgtaaataaatgggttttgttatgttttaatattaatgtaatttaggttttttttttttttttttttttttgagatagagttttgtttttgttgtttaggttggagtgtagtggtgtaattttggtttattgttatttttgttttttaggtttaagtgatttttttgttttagtttttggaattagttgggattataggggtttgttaatatgtttggttaatttttgtatttttagtagagatggggttttattatgttggttatgttggtttttaatttttgattttaggtgatttatttgttttggttttttaaagtgttgatattataggtgtaagttattgtgtttggttgagtttttttatttattgtgtttataatttattttgtaaaggatgtaattatttattgtttttatttgggttaaatatttttattttaaggggaaaaaaagtaaaagtatatattgatgtatttaggatattttaatttgaatataaataaaaatggtatttaaatattttttttgagatggagttttatttttgttgtttaggttggagtgtagtggtgttattttggtttattgtaatttttaatttttaggtttaagtgatttttttgttttagttttttaagtagttgggattataggtatttgttattatatttggttaatgtttatatttttattagagaggaggttttattatgttggttatgttggttttgaatttttgattttaggtgatttgtttattttagttttttaaagtgttgggattataggtatgagttattagtgtttagtttttaaatattatttttaatgtattaagaaatatagttaggagtgtggtttatatttgtaattttagttttttgggaggttgaggagggtagattatttgaggttaaggagttttatattagtttggttagtgtagtgaaattttgtttttgaaaaatattataaaagaggttaggtgtagtggtttatatttgtaattttagtattttgggaggttgaggtaggtggattatgaggttaggagattgagattattttaatatggtgaaattttatttttattaaaaatataaaaaaaaataattagttaggtgtggtggtgggtgtttgtagttttagttatttgggagatttaggtaggagaatggtgtgaatttggtaggtggagtttgtagtgagttgagattgtattattgtattttagtttgggtgatatggtgagtttttgttttaaaaataaaaataaaaataaaaaatattataaaagaggttaggtgtggtggtttatatttgtaattttagtattttgggaggttgaggtgtgtggattatgaggttaggagattgagattattttggttaatatggtgaaattttgtttttattaaaaatataaaaaaattagttaggtgtggtggtgggtgtttgtagttttagttatgtgggaggttgaggtaggagaatggtgtgaatttgggaggtggagtttgttatgagttgagattgtattattgtattttagtttgggtgatagagtgagattttatgtaaaaaaaaaaaaaaaatattataaaagaaagaaaataaataatataggtaggtggttggggtttttttttggtttagtattggtaggttttttttgatgaggttgtatttttttaaatgtgtaagtggtttagtgtgtgtgtgtagtttttaggtgttgaatgttagttagtgtttattaatttggatgtttaggtttgagttagtattatatatttttgttgtgttttttgttttttgttgttttgagtgtttgtgtgttttttagtgtgagttgaatgatttgttttgtggtttttatatgtggtggggtgaaaattatattattagattttgggttgtttgtttagtgattgatgagaggtagaagtatttatgtattattgtatgattttagatgtggggaattggtgattgtgttagtttttatgttgtgtttttgtttaggatatggtgattgtggaagggttgggaatggtagaaagttatgattagttttaagtatttatttttttagtatgttttatttagaatttgaggaatgggttgagggagagattattagtgagattagagttggtagttgttattttaagttttgtagtttagggggatataggtttggggagtagttttgaggttgtttgtgattttttatttggtttgaggttatttttaggtagagaggtgaaggtgaggtagttgtgtgttgtttttttttttttgtaagatgtagttgatattttttatttgtataatttagtttttttttatgaggttattgagtgtttttatggtgtttatggtttaggttgttatggttttgtagatgtaggtagggtaatgttagttaggtgagtatatagtgtttttggtagtttttttgggagtttttgggagttttggttattgtattttggagaggagaattagggtttttttttatatttgtatagtaagggtttttttatttgttagttatgtagttgaaggttttggtgggttaaggttgttgggtgttagtttttttgtttgtattaaggttgggtttaagttatagttttgttttagatgttaaaaggttggagttttttttgtagttttgtatttgttttggtttatagtggggtttatttttgagttaggattatagggtttaggagatgggtttgttttttttgtttttggtgggtagtatgtttggttttattttttagtatttttttgggtggtagggtaggtattatatggtaggggaatttgtgtaggagtattttttggaagattatgaagttattgtattgtttgtatattgaggatttgaagtgttgtaagagaagggttggtgtttagatttgatgttggaaattatgttgttgtgttatttttttttaatagagtttgggaaaatgatagtattaagtgtatttttttttattaggtttttattaaatggagaaattttgtgatggttttgtatatggaaatataatttttaaattttgtatagtttttaggttgggtgtggtggtttttgtttgtaattttagtattttgggaggttgaggtgggtgaattatttgaggttaggagttaaagagattagtttggttaatatggtaaaattttatttttattaaaaatataaaaattagttgggtatggtggtgggtggttgtagttttagttattttggagtttgaggtaggagaattttttgaattttggagatagaggttgtagtgatttaagattgtgttattgtattttagtttggatgataaagtgagattttgttttaaaaaaattaaaaaaggttgggtgtggtggtttatgtttgtatttttagtattttgggaggttgagataggtggattatgaggttaggagattgagattattttggttaatatggtgaaattttgtttttattaaaaatataaaaaattagttgggtgtggtggtgggtatttgtagttttagttatttaggaagttgaggtaggagaatggtgtgaatttgggaggtagagtttgtggtgagttgagattatgttattgtattttagtttgggtggtagagtgagattttattttaaaaaaaaaaaaaaaattaaataaatggtatgaagtatagtggttttttatttggttagtgattggtttgttatatatatattagggtgattaaattgtttttttgataaatgttttttatgtggtaatgaatttatttaagggatgggtagtttagtaagattggataaaaggttagttgttggttttttggtaggtaatggtatgttttatatgtttagagttgttttatttttaggttgttaggttttagaaggaaggggtggtttgttttgtttttttgtggtattttattagttggtttatatttttgattgtggtttagagggttgggaattatggtaaagttagatagtaaggtggttttgatatggttttttaagggagtttttttttttgatttgttttgttttttggtagtagtattgataattatttggattgtgtggttataggttttggaatatagtgaagtatagtagagtagatggtagggaggggagattggtttgtttgtttttaaggttaggtgtagtggtttatgtttgtgagtttagtattttggtgggttaaagtgagaggattgtttgagtttaggagtttgagattagttgagataatatagtaagtttttatttgtattttaaaaaaaaaaaaaaaaaaaagattgggtatggtggtttatgtttgtaattttagtattttgggaaattaaggtaggaggattatttgagtttaggagtttaagattagtttggataatatagtgagattttatttttataaataatttaaaaaattgtttggtgtggtggtatttgtttgtggttttagttatttaggagattgaggtgggagggttgtttgagtttgggaggttgaggttgtagtgagttatgattgtgttattgtattttagtttggttgatagagtaatattttgtttttttaaaaataagtaaataaaaagatataatttttatttaggattatttgtttatgatgttttttaaataagtttttggtagtgttgtttggttggggttgggttagggttgtttttttttatataggagtgggttttgttttgtttgtgtgaattttataagttttgttgattttatattttttaaggatagtgttagtttattaattatttaatgtttaggatgaataatgaaaatttttattagaatttgttgtaatggaattgagataatgaagtaagggatagagagagttatggtgttgttttagatgggtattaggtatttggtgtttgtgttttatttgtttaatattgggatgtttagtaataggagggttgtgttattaaaggggattagagtgatatatattgattttgttatgtaaattttatttattgtttggggtttggagttgatggggttgatattttaatttttgggggttttttattattataaagtgaggttggtgtggattttgttttgtgttttgtggattgtttgtgggagatttttaagaaataggtttttaggttgggtgtggtggtttatgttagtaattttagtattttgggaggttgaggtgggtggattataaggttaggagattaagattattttggttaatatggtgaaattttgtttttattaaaaaaaaaaatataaaaaaatttgttaggtgtggtggtgggtatttgttattttagttatttgggaggttgaggtaggagaattgtttgaatttgggaggtagagtttgtagtgagttgagattatgttattgtattttagtttgggtgatagagtaagattttatattggggaaaaaaaaaaaagaaataggattttagagtatagtggtggggaggataaattggattaggggtgattaggtggggatgtggttgggttagagtgaggtgtggggagtagaggtgtggaaaagttatttttgtagtttgattttgttgtgagttttggattttgtttgtaagttagttatatagatttattttttagtttttttttgttatattatttttgttttgagatgttgagatgtgattttttttttttttttttgttttgatatatatataatttgttagttatttggttggaaattttatattttatatgttttaggaagaggttttttttttttggaatgagttttatttgtatggtgtttttggttagtagtttttgtagggtgtgggatagtagtagtgggtttttttgtggtatttgtatttgattgggggttgggatttgttgtatgatggtttggggtttgatggtttggggtgttggtagattt

SEQ ID NO: 246 - DNA, 15597 bp, Artificial Sequence
  chemically treated genomic DNA (Homo sapiens)
agatttgttgatattttaggttattgagttttaggttattgtgtagtaggttttagtttttagttgaatgtagatgttgtaggggaatttgttgttgttgttttatattttgtaggagttgttggttagggatattgtgtaggtggagtttattttggagaagaagggtttttttttgaagtatgtggagtatgaggtttttagttaggtaattggtaaattgtgtgtgtgttggggtaggagggggaagaaagggttatgttttaatattttagggtaggagtggtgtgataggagaaggttgaagggtgagtttgtgtggttggtttataggtaagatttagaatttgtagtagagttaggttgtggaggtgatttttttatatttttgttttttgtattttattttggtttagttatgtttttatttggttatttttggtttagtttgttttttttattattgtgttttggagttttgttttttttttttttttttttgatgtggagttttgttttgttgtttaggttggagtgtagtggtatgattttggtttattgtaaattttgttttttgggtttaagtgatttttttgttttagttttttaagtagttgggatgataggtgtttgttattatgtttggtaaatttttttgtatttttttttttagtagagatagggttttattatgttagttagggtggttttgattttttgattttatgatttatttgttttggttttttaaagtgttgggattattggtgtgagttattgtgtttggtttggaggtttgttttttaggaattttttgtggatggtttatagagtataaagtgggatttatattagttttgttttgtaatagtgggaaatttttgaggattagaatgttagttttattgattttggattttaaatagtgaatgaaatttgtatggtaggattaatatgtgttattttaattttttttaataatatggtttttttgttgttgggtattttgatattgggtaggtgagatatagatattgagtgtttgatgtttgtttggagtaatattgtggttttttttgttttttgttttgttgttttagttttattatgatagattttgatgggagtttttattgtttattttgggtattgagtaattgatgagttaatattgtttttgggaggtgtggagttagtagggtttgtgggatttgtatagatagagtagggtttatttttgtgtgggagagggtggttttggtttagttttggttggatggtattgttaggggtttgtttgaaaagtgttatgagtagatggttttgggtaaaagttgtgtttttttgtttgtttgtttttaaagagatagggtattgttttgttaattaggttggagtgtagtggtatgattatagtttattatagttttaattttttaggtttaagtaatttttttattttagttttttgagtagttggaattataggtggatgttattatattaggtagttttttaaattatttgtagagatgggattttattatattgtttaggttggttttgagtttttgggtttaagtggtttttttgttttggttttttaaagtgttgggattataggtgtgagttattatgtttagttttttttttttttttttttttaaagtataaatggagatttgttatgttgttttagttggttttgaatttttgggtttaagtagtttttttattttggtttgttaaagtgttaggtttataggtatgagttattgtatttggttttaaggataagtgagttggttttttttttttgttgtttgttttgttgtgttttattgtgttttagagtttgtggttatatggtttgaatggttgttagtattgttattaaaggataaagtgggttagaggggaggatttttttggaggattgtgttagagttgttttgttgtttggttttgttgtggtttttggttttttgggttgtagttggggatgtggattagttggtgggatgttatgggggagtagagtgagttattttttttttttggggtttggtagtttgggggtgaggtaattttgagtgtgtgagatgtgttgttgtttgttagggagttagtggttggttttttgtttagttttattaagttgtttgttttttaagtaaatttattgttatatagggaatatttgttaagggggtagtttggttattttgatgtgtgtgtaatgggttagttattgattaggtgggaagttattatgttttatattatttgtttagttttttttttttttttgaaatggagttttgttttgttgtttaggttggagtgtagtggtgtgattttagtttattgtaagttttgttttttgggtttatgttatttttttgttttagttttttgagtagttgggattataggtgtttattattatgtttggttaattttttgtgtttttagtagagatgaggttttattgtgttggttaggatggttttgattttttgattttatgatttgtttgttttggttttttaaagtgttgggaatgtaggtgtgagttattgtgtttggttttttttaatttttttaagataaggttttgttttgttgtttaggttagagtgtagtggtatgattttggattattgtaatttttgtttttagggtttaagggatttttttgttttaggttttaaagtagttgggattatagttgtttattattatgtttagttaatttttgtatttttagtagagatgggattttgttatgttggttaggttggtttttttaatttttgattttaggtgatttatttgttttaattttttagaatgttgagattataggtgggagttattgtatttggtttaagagttatataaagtttaaaagttgtatttttatatatgaagttgttatagggtttttttatttagtaaaggtttggtgagagaagatgtatttggtgttgttgtttttttgggttttgttgaggggaagtgatgtgatagtatagtttttaatgttggatttaagtattgattttttttttgtagtgttttaagtttttggtatatagatggtataatgattttgtggttttttaggagatgtttttgtataagtttttttattgtatggtgtttgttttgttatttaagagaatgttgggaggtaaagttaggtgtgttgtttattgggggtggagggagtgagtttattttttggattttgtggttttggtttagggatggattttattgtagattggggtaggtgtagggttgtgggggaaattttagttttttggtatttgggatagagttgtggtttgagtttagttttggtgtaggtagggagattggtatttggtagttttggtttattagagtttttagttgtatgattgataggtggggaagtttttgttgtgtaggtgtgaaagagaattttagtttttttttttagagtgtagtggttagggtttttgagagtttttgagagggttgttaggagtattgtgtgtttatttggttggtattgttttgtttgtatttgtaaagttatggtagtttgagttatgggtattatgggagtgtttggtggttttatggaagagaattgagttgtgtaagtaggaaatgttagttgtattttgtaggagagaaaaagtagtatatggttgttttatttttatttttttgtttgaagatggttttgggttaggtgggagattgtagatgattttagagttgttttttaggtttgtgtttttttgggttgtagagtttgggatggtggttgttagttttgattttattggtggttttttttttagtttgttttttaaattttgaataaaatatgttggggaaatgagtgtttagagttgattatggttttttgttgtttttagtttttttatagttattgtgttttggatggggatgtagtatgggagttaatatagttgttagttttttgtatttgaaattgtatgatgatgtataaatgtttttgttttttattggttattgagtaagtagtttagggtttgatgatgtgatttttattttgttgtatgtgaaggttatagagtagattatttagtttatgttgaagggtatatgggtgtttagggtagtagagagtagaggatgtgatagggatgtgtgatgttggtttaggtttgggtatttgagttgatgagtgttggttggtgtttagtgtttggaaattgtatatgtgtgttgggttgtttgtgtatttaaggaagtgtagttttattggaagaggtttgttagtgttgagttaggagggagttttagttatttatttgtattgtttgtttttttttttttatggtgttttttttttttttttatatggagttttgttttgttgtttaggttggagtgtagtggtgtaattttggtttatggtaagttttgttttttgggtttatgttatttttttgttttagttttttgtgtagttgggattataggtgtttgttattatgtttggttaatttttttgtatttttagtagagatggggttttattgtgttagttaggatggttttaattttttgattttgtgatttgtgtattttagttttttaaagtgttgggattataggtgtgagttattgtatttggttttttttatggtgttttttgtttttgtttttgtttttgagatgaagatttgttgtgttatttaggttggagtgtagtggtgtggttttggtttattgtaagttttgtttgttgggtttatgttatttttttgtttgagttttttaagtagttgggattataggtgtttgttattatgtttggttaattatttttttttgtatttttagtggagatggggttttattgtgttaggatggttttaattttttgattttatgatttatttgttttagttttttaaagtgttgggattataggtgtgagttattgtgtttggttttttttatggtattttttagagatagggttttgttatgttggttaggttgatgtagaattttttggttttaagtgatttgttttttttagttttttaagaggttgggattataggtgtgagttatatttttggttgtattttttaatatattaaaaatagtatttaaaggttgggtgttggtggtttatgtttgtaattttagtattttgggaggttgaggtgggtggattatttgaggttaggagtttgagattagtatgattaatatggtgaaattttttttttaataaaagtataaatattagttaggtgtggtggtgggtgtttgtaattttagttatttgggaggttgaggtaggagaattgtttgaatttgggagttagaggttgtagtgagttgagatgatattattgtattttagtttgggtgataagagtgaaattttgttttaaaaaaagtatttaaatattatttttgtttgtgtttagattgaaatgttttgaatgtattagtatatgtttttattttttttttttttggagtgaaaatatttaatttgaatgaaagtaatgagtaattgtattttttgtagagtaagttataagtatagtgaatagaaaaatttggttgggtgtggtggtttatgtttgtaatattagtattttgggaggttgaggtaggtggattatttgaggttaggagttggagattagtgtgattaatatggtgaaattttatttttattaaaaatataaaaattagttaggtatgttggtgggtttttgtaattttagttaattttagaggttgagataggagaattgtttgaatttggaaggtggaggtagtagtgagttgagattgtgttattgtattttagtttgggtaataggagtgaaattttgttttaaaaaaaaaaaaaagaaaagaagatttgggttgtgttagtgttagagtgtagtaaaatttatttgtttgtagtgagaagtgttaggaggggattatggaagatgtttttaatggaggtgattaaagtgattatttatgtggtttttaggatttttgatggaaataagtagatttgtggttttttttggtagtttttggatttaagtgtgtgtggttggagggggtttttgggggtgaggttattgttttgggtggtttttttagatttattgtttgagtagtattgggggtttagttagtgttttttgttagttgttgggttttttgttatttttagggagagttttgagaatttgtttagagtagaagatgggggttggtgttttggattttgtttagtgattttgtgtgtttttttagttgatagggagtttattgaggttaggaggagagttttgaagtgttttgttaatttggtggtgtgatattttttgttttttgaggatgtggtttttaagttttttttgttttttagtggtttggtgagtgtgtttgttttgtttatgttttggttttggggagtttttgagtttttggatttgttttttttttttttaggtgtggttttttatttttttggttttttgtttggatgtttagtaggaatgatatggataagattttttttttttttagataatagtttgaatgtgatttttagaggtgtttttggtgttgattttgtaggattttgtaaatttgtgtggagattatggatttttgtggttattttgaggatttaggttggatggtttggagggtttagggaggtgttagagattttagatgggaagaagtgttgatttaaaataaggttttgtttgattaaggattattggaatataggttgagtttttttgttagagttatagtttatatttgtatttgggaattaatttgttgtatatgtattttgttagaggtttgagtggggtttttttttttttagttgttgtggtatagttttattgtgtgttaagaagttatagtttgtaggtatagtggtttatgtttttaattttagtgtttggagaggttgaggttggatggttttttaagtttaggtgtttgagattagtttggataatatagtgagattttgtttttattaaaataaaattgaggttaggtatggtggtgtatatttgtaattttagttatttgggaggttgaggtatgagaattgtttgaatttaggaggtggagtttgtagtgagttgtgattgtgttattgtattttagtttgggtgatagagtgagattttgttttaaaaaaataaaaaataattttgtagtttagtttttgttttttggaggaggaagtagttgttagtttttttagggaaggtgggttttgtgttttttttttatttgtgtttgtaggattttttttttgtgtggggaggggtgggggttttattggaatagaggtttttaggtttttttttattttagggaaattttgttttgaatggggatttgatggtttttgtttttgtttttgttgtaggaagatatttttttttttaggttgattttatataagttttggttttttttgtttttgttttttttggaggtagaggggttttttttttgtgtttgagatgtttttgggatgtttttggggatgtttggagtaggtagtgggattttttgagttttggggttggaaatttttttttggaggtgatttgtattgttagtagaggaatgtggtaggatttgggaggggtggtgggtaggggtgtagtgggttataggtgggtaatatttttgttttgggggtaggatgttttttgtggtttttttataggtattattttttgttattttttggttttagtttttttgtttgttttttgtttttagagatggggttttattatgttatttaggttggttttgaatttttgggttttagtgatttttttgttttaggttttgagtagttgggattataggtatgtattatgttgggttttaggtttttttttttttttttttttttttttttgtaaaatgagagttgagttagatgatttttaaggtatttttgaaatttgagaatttttggatatgtaaatagttgtatattagggtttttttttgtattttttgggtggtttttgattttaaggtatggttttgtttaggaggttttttttagatgagagggttttggtgttaggggttgggtttgtttttttgtttagtagttttttgggttttggtgtttttggtgttatggatgtatttttaggaaggaagatatttttgttttgttttattgtgtttttggaagttattagggttttaggtatttttggggttgatgttgttttgggtttgtggatggaggggttgtttttttgtagagttgtttttggtttgtggatggagtggttgtttttttggagagttgttttttgtttgtggatggagtggttgtgtttttggagagaggttgtaggtttgtggtgtttttgttgtgaagttaggttgttttgtttggtgagaaaaatatttaagggagagttaagagattgtagaatattaatgttaaagttaatatatggaaatgtgttttttttgaggaaagatgattttttgttttatagtgatttatattttatagtagtttttttgttgttagtagaagagggtgaagttgtgtgttttttttttgtaggatgtgtagaataagttaaaggagttagtatagtgtgttggggatgaatttttgaattgtaagttggttattagggttaaggtattttttttttttttttttttttttttttttttaatttatttttttattgattatttttgggtgttttttgtagagggggatttggtagggttatgggataatagtggagggaaggttagtagataaataagtgaataaaggtttttggtttttttaggtagaggattttgtggttttttgtagtgtttgtgtttttgattatttgagattagggagtggtgatgatttttaatgagtatgttgtttttaagtatttgtttaataaagtatattttgtattgtttttaatttatttaattttgagtggatatagtatagggttgggggtaaggttatagattaataggattttaaggtagaggaattttttttagtatagaataaaatgaaaagttttttatgtttatttttttttatatagatatggtaattatttgattttttaattttttttttattttttttgtttttttattttataaagttgttattgttattttggtttgtttttaatgagttgttgggtatattttttagatggggtggtggttgggtagaggggttttttattttttagtaggggtggttgggtagaggtgttttttattttttggatggggtggttggttaggtaggggggttgatttttttttattttttttttggatggggtggttggttgggtggggggttgatttttttattttttttttggatggggtggttggttgggtagagggtttttttattttttagtaggggtggttgggtagaggtgttttttattttttggatggggtggttggttgggttggggggttgattttttttattttttttttggatggggtggttggttgggtagaggggttttttattttttagtaggggtggttgggtagaggtgttttttattttttagatggggtggttggttgggtggagggttgatttttttattttttttttggatagggtggttggttaggtggggggttgatttttttattttttttttggatggtatggttggttgggtgggggggttgattttttattttttttttggatggggtggttggttgggtggggggttgattttttttattttttttttggatggggtggttgttgggtggagatgttttttattttttagatggggtggttgttgggtggagaggttttttattttttagatagggtagttgttgggtggaggggttttttattttttagatggggtggttgttaggtagagggtttttttattttttagatggggtggttgggtagagatgttttttattttttagatggggttttgttgggtagaggtgttttttatattttagatggggtggttggttgggtggagggttgatgttttttattttttttttggatggggtggttggttaggtggggggttgatttttttattttttttttggatggggtggttggttaggtggtggggttgatttttttattttttttttggatggggtggttggttgggtagagatgttttttattttttagatggggttttggttgggtagaggtgttttttatattttagatggggtggtggggtagaggtgttttttatattttagattatgggtggttgggtagagatgttttttattttttagatgtgatggtggttgggaagaggtgttttttattttttagatgggatggtggttgggtggagatgttttttattttttagattgggtagttaggtagaggggttttttatattttagatgatgggtggttaggtagagatattttttattttttagatggggtggtggttgggtagaggttgtagttttggtattttgggaggttaaggtaggtggttgggaggtgtaggttgtagtgagttgagattatgttattgtattttagtttgggtattattgagtattgagtgaatgagattttgtttgtaattttggtattttgggaggttgaggttggtggattatttgtggttaggggttggagattggtttggttaatatagtgaaattttgtttttattaaaattagttaggtgtggtggtgtgtgtttgtaattgtaggtatttggtagattgaggtaggagaattaggtagggaggttgtagtgagttgagatggtagtagtatagtttagttttggttttgtatgagagggagattgtggggtgagggagagggagagggggagggggagggggagggggagggagagggttaaggtatttttttaattttgaagagtatatttttttttaattagagaaataagttttaattttttaaagtgattttgttttttttgtgtggtagggattatgttgatatttgttgtatggtttttttatttaatttttgttttagttgttttgatatagggttgggaggtttgttttatggatggagaaataggtttagggaggttgttatttgttaaggttttgagtttttaagtagtagggttgggttgtggttgagttttgtttttaggttttttaggtattttgtgttttttgtttttttttgtgatttagatagatggatgtttgtgttagtatttttttagatttttggggatttattgttatatttgtttattattaaatgtttaaagtttggtttttttttaaaaaagattaaggtagttatttggtagtttttttgtttttggttttttttttttaaattttttttttaggttggtgtggtggtttttttttgtaattttagtattttgggaggttgaggttgttggattatttgaggttaggagtttgagattagtttggttaatatagtaaaattttatttttaataaaaatataaaataaaaaaggaaaataaaaaaaagtaaaataaattttaaaaaattggttgggtgtggtggtttatgtttgtaattttagtattttgggaggttgaggtgggtggattatgaggttaggagtttaagattagtttgattaatatggtgaaattttgtttttattaaaaatataaaaattagttgggtgtggtggtgtgtatttgtaattttagttatttaggaggttgaggtaggagaattgtttgaatttaggaggaagaggttggagtgagttaagattgtgttattgtattttagtttggatgatagagatattattaaaaaaaagaaaaaaaaaattagttaggtttggtggtaggtatttgtaattttagttatttgggaggttgaggtaagaggattgtttgaatttaggaggtagaggttgtagtgagtttaggttgtgttattgtattttagtttgggtaatagagtgagattttgtgttaaagatgataataataataataaaaaaattagaaaaaaatttgtttttttatataaaaattaaaaatttattttattttattttttgagataaggttttgttttgttttttaggttatagtgtagtggtgtaattgtaggttattgtagttttgattttttgagtttaagtaatttttttattttagttttttagaatagttgggattataggtatgtattatagtatttggttgatttgtttgtttgtttttggtatagatgaagttttattatgttgtttaggttggttttgaatttttggttttaagtaatttttttggtatggttttttaaagtattgggattaaaggtatgagttattatgtttggttaaattttttatttttattttattttttgagttttttgttttttgaattttgatagttagtattaaattttataaaaagtttttgggaataaatgtggtatagaagaggttttttttttatgtggagagttttttaggaatttatgtttattgtgtttaatttgaagattgtttgtttttatttttgttgttttttggggatagggtttttaggttggagtgtagtgttgtgattatggttttttgtagtatggaatttttgggtttaagtgatttttttgttttagttttttgtaagtatttgggattataggtgttttattatgtttggttaattttttgattttttgggagagatggggttttattatgttgtttaggttgtttttaaatttttaggttttagtaatttttttgttttagttttttagagtgttggggtataggtgtgagttattgtatttagttaaagattagtattgttagtttttgagatggagttttgttttgttgtttaggttggggtgtagtggtgtgattgtagtttattgtaagttttgtttttggggtttatgttatttttttgttttagttttttaagtagttgggattaggtgtttattattaggtttggttaattttttgtatttttagtagagatggggttttattatagttttgatttttttattttgtgatttgttttatttggttttttaaagtgttgggattataggtgtgagttattgtgtttggtaagattattatttgagtgttttgttggtttgtttgttttgagatagagttttgttttgttgtttaaattggagtgtggttgtgtgattttagtttattgtaatttttgttttttggatttaagtaatttttttgttttagtttttggagtagttgggattataggtgtatgttgttatgtttagttaatttttgtatttttagtggagatggggttttattatattggttaggttggttttgaatttttgatttgaggtgatttatttgttttagtttttaaagtgttgggattataggtgtgagtgattgtttttggttttatttgagtgtttttggataggttttttagtgtgatgagattttagtggattttgtggtttttattttatgggattatttgtttttgtgtttgtggtatgtaggtgatgatggtttttgttttttttttggatatatagagtgatttttgtaggtttggaggagtggggtttttggggtggtttatggatttgttgtgttttttgtggtttagtttttgggggattggttgttgttgtttgataggtgttttttagtgattaatatagtgtttttttttttattatgatgttaggatttttttttagttgatatttaggtttagtttgttattagttgggagttgatttggaatatttataatagtttttataagttttgtgatagggttgagtggattgtattgtgggttattgataatgtggtagatttttttatatttgggaaggagttaaggtaggtgattttttagtttttgtaggggtatgtgtggtgggatgggaatttatgttggtgaagggtttgggtggaaagtgtgtttattgtaataattagtattttgatttgttttattttagaaggggtagaaagtggtttaggtatatggggggttatatttggaagaaatatgggagaattttggttttgaaatatggatttttgagtatgagtaaatgtttattagtttttagtttggtagtttttttattgttaggatgagattttaaaaaaagattttaggttaggtgtggtggtttatatttgtaattttagtattttgggaggttgaggtgggtggattatgaggttaggagtttaagattagtttggttaagatggtgaaatttgtttttattaaaaatataaaaaaaagttttttgggtgtggtggtgggtgtttgttattttagttatttgggaggttgaggtagagaattgtttgaatttaggaggtggaggttgtagtgagttgagattgtgttattgtattttagtttgggtgatatagtgagattttgttttaaaaaaaaaaaagatttttttgatttggggaagaatagattatgggttggtagtgttttttttgtttgaggggaggggagattttatttgggattttgtttgttttagtagtgtttgttatttgtgtatatatgttatttgggggttggttgggaagaagagatgtagtaggttttgaggtgtagttttagggttatttttttttttgggtttttagggtttttataggttattttttgagtagtagggttttaggatggggttatgtaggttgttgtggaggatatttgttgggggggatgttagatttgattgttaggtgagttttaggttttgagtgtttttttttttgtgtgtttgtttttttagtgtaatagggtttgatatgattttgttgtttttttgggttgttttgaatagtagtatgtgggggtttttgaagtaggttttgaaaggtttgtttgtggaatttgtgttgtttgttgataaggttgtataataggtgagtggattggtttttttaggtgtttgttttagagaatatgttatgtttttgtatggggagtgttttttgtttagatgggtgttatagtttgtttttgttttgttgttttgagaaggagtttttttttgttgttaggttggagtgtaaaggtgtaattttggtttgttgtaatttttgttttttgggtttaagtgatttttttgttttagttttttgagtagttgggattataggtgtttattattatgtttggttaattttttgtatttttagtagagatgaggttttattatgtttgttaggttggttttgaatttttgattttaggtgatttgtttgttttggttttttaaagtgttgggattataggtgtgagttattgtgtttggttggttttttagttttgagttgagtgaatgatagttgtgttttgggtgggagttgtttatttatatttgtttttggtggttttttgggagtgtttatgtttttgagagggggttgttagtgataaaa

SEQ ID NO: 247 - DNA, 3143 bp, Artificial Sequence
  chemically treated genomic DNA (Homo sapiens)
ttatttaaatggggttgtgttttgattattagtgtaatgtgattatttgattttaaatgtaattatgtgtttaaatggttgagtgtaagaggttggttggagatagggttgagtgtgttgttttaagttgtgatttttgttaagtatttatggataatgtattggttttttttagggagtgttttttatttagggtagtagtaggagtggaatttggagttgtatatgttgggtttgtgatggataagtgtggttatgtaatagataggtagagggatgtagtaatatataaatggtttttgtaagtaatgttttgagtgagtagattttaggataataaataaattaaaattatattttaaattattggagattgggaggtagatgtggaagtaaaagagttagatgttggaatgtaggagggttagaaatgtttaaatattgttttttatttgttgttttttgtttgtttttttaaagggtgaaaagaggtatggaaatatataatttgttattattttagtttttagatgtagagaataaagggattattttgttttaaagaatttttgtttttttttttaaatttatttttttttggttaattgttattttggttttgatgtgttaaggaaagtgtgttgtaaggtggagtgtttgggttgatgatgagaaggtgagttgtgaattttgtatatgtttttaaataaaaggtttatgagtggtggttttgatgtggggagtaagtaggtttttttggtttttgtagtaggtggatttaggtttgtttgttgttggatatttagaatttgtttttgtagtgtgagttttgtatatgttttgtgattggtatttttggattttttaattatttgttgtttaatttttggagagagggttttttgtttgttgagttgtggggttgggaaggaaaagggggatgtgtttttgggggtttttggatattttggtaaagggggttgtagttttaggttttagttaaagggtttgggatggagtgggttagaaagttgttaaattgaggattttttttttttttaagttggagttttaggtgtggagttgtttgtttatttatttttggagtatgttttgttgtttttgttggtggatgtggttggttattgtggtattttttttgtgatatttgggtgttagaaatttgtttttagagtttgttgtagtggattgaatttgttgtggtggtggttggggttggggtggtttgggtggaggaggttgaggttggttggttgtgttttgtgtttagagtattatatagtttagttataggaagtagagttggagatatagtttttgttttttttttattgttggtgttgaaagtgtgtggttgtagatttgtggagagggagtgattaaagataaaatttgtgtgttttagaaaagagttagggtttaataagttttttgttggttttggggatttttttgggtttgggttttttgttttagttggagattttgatagagtgttggttttttgattgtttgtgaagtgagatgtggggtgttgggtttagtgtagtgagtggtgaggtgtggtggaggtgtagttggtagttttgagtggtatatgttgtataattggtttaaagttttgagtgattttaggattgttagtgggtgggggaggaaattataaaagttttggtgtaaaattttaaaaaatgtgaattttaaaagaaaaaagggtttgtatgtagagtttggtggatttttgtgtgttttgaagatggatattggaaagttgtaaaagttattagaaagaaataggtaagtaaataaaagttgtttttagaagaagaggagggttttttttgggtttgtttggagttttatagggtaatgaagtgtgggtagtggttgtggagttgggtggaggtgtgtggggttggggtgtgtggttagtaagagagagggtgggaggttgggtgttggagaagatgtggtggtggagggtgtggtgtgggggttttagaggtttggtggggtgtggggtgggttggtgggtggtggttgttagtgggggtgtggttgtttatatgtggggtttaatttggattgagaggttggtgtagagtgggtggggatagagtaagggagagattgggattgaggaatgaggggaattagggttgggtgaggggaagaggaaggaagggggggagggtgaagggagggaagaggatggagattggggagaaggggggtgaatttgagaggaaggttgggttggaagagggatttggaaagagggattggtgagtttgggtgtgagaggaaatgagtgggggatgggggtgaagttagggtaaagagagaagtgggaaaggagagggagggttaaggtttgggtgttgagaggaggggtttggggggttggttggagggggtgaggtgttaggtggttttgttttttgtttttgttaattggttgttagttttgttttgattgtttgtataaagtgagtagatggtgggggatggggtgattagggattggatttgggaaaggaggtagtagtttttttttttttttttttgtttttgtttggttgtggattagggattagggtgtttaagtgtgttaggtttggttggatttgtagttgaattgatttgtagttgaatttttttgttggatagaggttgtaaggttgaggatgagaatgggtttttttgtagggttttggtttttgatttgggatggggggatttgtagttagttaggaatagaggtttatggggttgttggttgtagttttaatttaagaaggaggagattttttttttgtttttttatttttattgttttattgggagtggtgttagtttgtgggattaaattaggggttgggagtttttagattgaaatgtgttttttattattaagagggagtttatgtggttgtggggggttgaggtagttagttggtgttgtggttttggggagtttgtgtaggggtgtgttttggtgtgaaatttggtaggattttgtttgggtttgtatgtagggaggggttagagattttgaaatgtattagtgggtagggtggtgataaggtgggtaaatgaggtttggggtatgtttttgtttt

SEQ ID NO: 248 - DNA, 3143 bp, Artificial Sequence
  chemically treated genomic DNA (Homo sapiens)
gaagtaagggtatgttttgagttttatttatttgttttgttattattttgtttgttagtatattttagagtttttaatttttttttgtatgtaagtttaggtagagttttgttaggttttatattagagtatatttttgtatggattttttaggattgtggtgttggttggttgttttggttttttgtggttgtgtgagtttttttttggtggtggagggtgtattttaatttggaaatttttagtttttaatttggttttgtagattgatgttgtttttggtggggtggtgggggtaggagggtaaaggggaggtttttttttttttggattgaggttgtaattaatagttttgtgagtttttatttttggttgattgtgaatttttttattttaggttaggggttgggattttatagaaagatttgtttttatttttaattttgtggtttttgtttggtggggaagtttagttgtgggttagtttagttgtgggtttggttaagtttggtgtgtttaggtattttagtttttggtttgtggttgggtgaggatggagggggaggggaaggggttgttgtttttttttttaaatttggtttttaattgttttattttttgttgtttatttgttttgtataggtagttaaaatagagttagtggttaattgatggggatgggaagtaaagttgtttagtgttttgttttttttagttggttttttgggtttttttttttggtgtttggattttggttttttttttttttttttatttttttttttgttttaattttgtttttattttttgtttatttttttttgtatttgggtttgttaatttttttttttaagttttttttttagtttggttttttttttgggtttgttttttttttttttaatttttgtttttttttttttttttgtttttttttttttttttttttttttttttatttaattttggttttttttgttttttagttttgattttttttttattttgtttttgtttattttgtgttggttttttagtttgggttgagttttatgtgtggatggttgtgtttttattgatagttgttgtttgttggtttgttttgtgttttgttgggtttttaaaatttttgtgttgtgttttttattgttgtattttttttagtgtttagttttttgtttttttttttgttggttgtatgttttggttttgtgtatttttgtttggttttgtagttgttatttgtgttttgttgttttgtgggattttgagtgagtttggagggaatttttttttttttttgggggtgatttttgtttgtttgtttgtttttttttggtgatttttgtagttttttaatatttgtttttggagtgtatgggaatttgttgagttttgtgtgtaggttttttttttttttgaggtttatattttttgaaattttatgttagggtttttgtaatttttttttttgtttgttgatggttttggagttgtttggggttttaggttggttatgtaatgtgtattgtttggggttgttggttgtatttttgttgtgttttgttgtttattgtgttagatttggtgttttgtgttttgttttgtgggtagttagggggttggtgttttgttgaggtttttagttagagtagggagtttgagtttgagggagtttttggagttgatgaagggtttattagattttgatttttttttgaggtgtgtagattttgtttttgattattttttttttgtgggtttatggttgtgtgtttttggtgttggtgatggggagaagatggaggttgtgtttttagttttattttttgtggttgggttgtgtggtgttttgggtgtagggtatggttggttagttttagttttttttgtttaagttgttttggttttagttgttgttgtaataggtttggtttgttatagtaggttttgaaggtgggtttttagtgtttgagtattgtgaggagggtgttgtagtggttagttgtgtttgttggtgaggatagtaggatgtgttttgagggtaagtgggtaagtggttttgtatttagggttttggtttgggggaggggggaatttttagtttggtggttttttggtttattttgttttagattttttagttggagtttagagttgtagttttttttgttagaatatttaaagatttttaggagtgtgtttttttttttttttttaattttgtagtttagtgggtggaaagttttttttttgggggttgggtggtgggtggttagggggtttaggggtgttgattgtagagtgtgtgtagagtttgtgttgtgggaataggttttgaatgtttggtggtaggtgggtttgggtttgtttgttgtaggggttagagaagtttgtttgttttttatgttggggttgttgtttgtgagttttttgtttgaggatgtgtgtagggtttatagtttatttttttattgttaatttgagtgttttattttgtgatgtgttttttttgatatgttggggttaaagtaatagttgattaaggaggaatggatttgggaaggagggtaaggattttttggaatggaatggtttttttgttttttgtatttggaagttagaatagtagtaaattatatgtttttatgtttttttttgttttttaaaaaggtaggtaagggatgatagatgaaaggtagtgtttagatatttttgatttttttgtattttagtatttagtttttttgtttttatgtttgttttttgatttttaataatttgaagtgtaattttgatttgtttgttgttttgaaatttatttgtttggggtattgtttatgaagattgtttatatgttgttgtatttttttatttatttgttatgtgattgtgtttgtttattataggtttaatgtgtgtggttttagattttatttttattgttgttttggatggaagatgttttttggaggaaattagtgtattgtttgtgagtgtttggtagggattgtagtttggggtagtgtatttggttttatttttggttgattttttgtatttagttatttggatgtatagttgtgtttaaaattaagtgattatattgtattgataattgggatgtggttttatttgaatag

SEQ ID NO: 249 - DNA, 6676 bp, Artificial Sequence
  chemically treated genomic DNA (Homo sapiens)
gattaaatgaaatattgtaatataaggtgaggtaggtttgtgggaattggtttttagtgggtggtggtagagtggggaggattggaggggttagggttgggggtggtatgggtttttgggttgttgggtttttttgggtgggtttagggttggaaggtgttgttagttgtagttaggtttatattttttaatttgttgttttttttttattttatgtgttggttttggaattagattttgatttggtgtttggataggtagagtgtgtgggtgattttgatgtgttgttgttgggttaggtagtggttgaagtggaattttttttttagttttagggtttggtagtgggtatatgtggtttgggttttttttttgtttggtttggttatatttggagtagatagaggaaagttgtaaggtaatattattttggttaagggagggggtattgggtgggagggggtgggggagtaggatttaggtgttttggtatttagtttattatagttttaattttttttattttagatgtttatatttaagtttgatttttgtatttttttttattgtattttttatttttgtaggtagttagtgtgtttggttttgttttttgtttgtttttagtgttttatttttggttgggtttaggtggttgtttgttttgggagggaggagagtggttgtatttttgttttggaaagttttttttattgtttattttttttttgttagtgatagttttaaaattttaggggtaagtaggatttttttttatattatatgaattttattttttattttaaagttggtttagttgtgttaataaaaatttaagttgaagttggaaataaattattaaaaatattttttttttaatagagagattttttttggttttgtttatgaagttatgaggttttttttagatattttttttttttagaaaaatgaatttatatttagggtaaagttaagttttttttgtttttttgattttattttaaaatgtagagaaggaaagttgagaagataaaaaagagagagagaattattatggttgatgtgaagtttttttatttaggggaatatttgtggagtttgttttttgggtgtggttgtggaggtggttatgggttttggttgtgtttgagttaggttggggttgtttagttggtttgttgtttttttaggttttgaggatgtgttggttttgtttattttggtgaaattggtgttggagttggttgaggttgtttggttggagggggatgaagtagagggtttggtgttgtggttgttgttgttggtgtagggtagggatttgggtgaggatagggagtagtttgaagttgtttgtttgaagtggggtttttgggtgggtgtggggaaggtgtgtgagtttttgtttattgttttaaagtggttggaggaggttgaggagtggttgatgttgaggtttattttattgtaattgtagttgtaagagttggtgtgtatggtagtgggatttttgtaagagttgtttagagagttgttattgttataatttagtaattgatagtttgggttatttggataatgttttgagaaggagtttataaagtatgagtttatttgggtgattttggagggtttgatttgtggattgtggttgttataattttgtgttttatgatttatgatgtattaatgaattatagtgatgtattgtattttgttttgttatgtatgtggttaaatatggggggggggttggaaggggggtggggggtgttagggaattatgtgtttttgttgattagttgtaaatttttgttgatgattttaagaggtaatttatgttttatggttataaataatgatgatttgagaattgttagggttgatttaatgtgagtttttgagagagggggaaaaaaggagaagggggagaaatagagagaaggttggttttggtttttgagtagagtgtgttattttttggtgattgatgggagtgtgggtgtgagattgttatggtggtgggtggttgtttttttgttggttttttgtaggttttttgtagttgttgggagagaaagaaatttggttaaggtttagttatagggttgagttttttagagtaggggttgggttttttatttatttttttgtgggtggggttagtttttttatttggttttttttttttatattattattgttgttattattttaattttggatgagaagattaaagatagagttgttttttttttttttgggttttgtaagtttttgaattggaggtggaaatgggggaagggttggaagttgtgtgtgaaaaataattattgtaatgggttttttttaggagtttagtttggtttgtattttggtggaattgttgttattggtttatagtgtttaggttgagttggtagggttgggtgggaggtttgaaaaagaaggagaagtgtttattttttttgggttatttggaagtttgaaatttttttttggatttttttggtggtttttagtttaggtgtggggagtgatagagtaggatagggattttagaaattgagtatagttggggttaagtggtttagttgttgaaaagattgtagtggttattgtgtttgttgtttagtttgagtagtaatatgtgtttgagagtttgtaaagtgggattttttttttttttttttggttattgtatttggaggttttattataggttttttatttgtagttaggtagtttgagaatttgtttggtggtagttgtttttttggaaaaggggttttaaggatttgtatgttttgttgagtatgttgggtggttagagattgttgtagttggttttttattaggaggggattattttttttaaaaataagaaaggaagtgagagggtggaggaataaaggaaaatagtgattgtagtttgttttttgggtgttggtgtaagtagagagagaatgagttattttgggttgagaggatgatattaaaagttttattatttggttttttgttttggggtttttaaggagtaagggaaagttgtggtttttggtttgtgtttggttggtggttttatatttttttatttgaggttgattttttatttgaggttgatttgttatttgaggtgggaaggggtatttggagtttttagttgtagggtgagagatatttagtggttttattttttagtttttagagttataggttaggagtggagggttaaggttggtgaaaaaatttggttatgtggatgggttaaagattaggggttgttgtgaaggtgaggatagaaaagtgttgtagaggtttttagattatggttttgtttttgttagagagttttaggggttttagtggtttttttagtgttgtgtatatatgaggaaaggttagagaatgagagggatatagtatttttttattttttaagtttgtatggggagaagtggttgtgagttttagtattagggaaatgtagtgttggggtttgggtaggattgattgttttagtttttattttagttgtaattttttagttgaatagggtttgttttggtgggttagggtttttgtttttgttgaagaattttggtttaggaaagatggagaggttgggggttgaggagagaggaaaaaatggtaggggaggattggaggtgattgagtgttgagtttttatatttttattattgttgttgttgttgttattattattattattattattattattattattattattattgaagtattttatgtttagagttaagataagattataaatataatatatagaaaattaataaaatagaattttgtttttttttgaggtttttttttttatttttaggtagtatgtgttttttttagtggttttggggagggggtgggagagatgataggtttgggattagggagtttttaaggtttttgttgaggggatagtgaatttattattgaattgtgtatgggggatatggataaaatgagatgtgatagggataagagtattttgttttgtttttaggaaatattaagtgagtttgttttttagtttttattaggaagtttgattaggttgaggtgagttttttgggaaggaagggtgtgtgggatgttgggtgggtttgagtagtgaggttttagagtatttgttgggagttgtgtgggtgggggtgtttaggagagtgttgggttttgtttgtttgtgttggagagtaggttttttggtttttttatttgagagtttttttttttgggtttttttgatgtttttggttttttataggtttttttttttgtgttttttttttttttttagtatttttatttggtttgttttttttttttttttttggtattgagttgagatgtgttgagtagtttgtttttttttttttattttatgtgttggttttggaattatattttgatttgtttttttgttaggtatagggtgtgtgtgattttgatgtgttgttgttgtgttaggtagtgattgtagtgaaattttttttttagttttagtgtttggtaatgtgtgtatgtttggtggttttgttggttgttgggtttaaaggaggaatttgttatgtagagtggagatgttgaggtttgtggttattgggtttaggatttttttttttagttgatttttgaatatagattttagttagtattgggatgttttttattttgttggttttttttttttgttttgtatttttttagtgttttttttagatttttttttagttttttaggtttgtgttgtttgtttagattttagatgggggaggggaggagtagtttgaatttttatttgagtttggggggaggggttggttaggtgtgtttttttttagttgtattttgtttttttttttttttttatttattttgtttttattttttgttatttttttaatttaatgataaatttaggttgttaatttgtaatgatgtagattgatttatagtttatattaatggttttttatttttgagtttggttaatggatattagttgggatttaaggttaataaataatttaatttgagattttgtgtttgttttttttttttttgttttgtttgtttttttttttttttttttttttatttttttttttttttttgattattattttttttttggtgttttattttgttttagttttttatttatagggaaatatagttttagatagatttaattttttttttttagtgttattttttatttttttgtatgatgtattttgtttttaatggagttgtttttggttggggaattttattagggttgggagaggggggttgggggtttaaagtaaagttaagttagtgattgtaggtttttgtttttttttttgttttggaattttggttttggttaggtgttttaggagagtatatttgttttttatggtttttagtgtggttgggattttgtaaattttgtaatttttgtttaataggggatatagtgagagatttttggttggtgtttaatttttttttattttttaattgagatgtttatttagtattttgtgggagattggggtagggggtgtttattagttttgtgttttggggtgggtgtttaggggagttggggtgatggtgatgggaagttttatttattgttgtatgaatttatttgttgtatttatgggtagattggagtggagtatttttgtttttttgttttgttgaatatgtttttgttttgtgtgtagtttgatttttgtggtttggggtggaatgggggttgtttgttggtgttggagagtgtgtaggttgatttttttttgtggtagaaggttggtgttggtttgtagttgtagggtgttgtttggttgtagttattgtttgttggtgggtaataggaggaagtggtaaagtttttgttttggtttggttttggtttgtagggtgtggggtaatgttttagtgggtttgtatagtttgatgaatagagtggtagttggtttaggaaggatttttgtttgttggttagagtgatggggaaggtggagtttatgaaataggaatttattgggaggggaggtgtgtgtggttgttgttgttttgttgggtttatgatttgttgtgttttatagtttgagtgttgtgtttattagtagtatatttgagattgggttttagttgaggggggatggtgaggtgttagtgagggttagaaggaaatataattatttgatttaatattgattaatggtagaggtaggaattgttaaatagtatttaggaggagtgtagtttgtatgagggatttgtgtataaatttattaatttttttttttttttttttttttttttgttttttttttttttttttttaataatataatgtgttttgttttatttatgtaggatttgtgaaataggtttagtgtttttgagggaggagggaatgtttagattgagattattttatttttgggtgattaaataaatatgttttttttttattttatgtaggattggaaaaagttaattgtgtttttagaaaagttaatttttgtgttgttttgattttttttttttggggagggttgggtaaatgtttttgaattgttttgagagagaattaaagaaggtttgtttttagggttttgtgttggta

SEQ ID NO: 250 - DNA, 6676 bp, Artificial Sequence
  chemically treated genomic DNA (Homo sapiens)
tattgatataaaattttagaaataaattttttttagtttttttttaaggtgatttggagatatttatttaattttttttggagagaaggggttgaagtaatgtaggggttaatttttttgaaaatataattaattttttttaattttgtgtggggtgggggagagatatatttatttaattatttgggagtggggtggttttaatttaaatgttttttttttttttaaaggtattgagtttgttttatagattttatgtaggtggaataggatgtgttgtgttgttggggggagagaggagaaaggtgaaggagaaggaggaaaaaaaaaaaggttgataggtttgtgtgtgggttttttgtgtgggttgtgttttttttgggtgttatttgataatttttgtttttgttattggttagtgttggattagatggttgtatttttttttggtttttattggtattttgttatttttttttagttaaaatttaattttggatatattattaataggtgtggtgtttggattataaaatataataaattataaatttggtggagtagtagtggttgtgtgtgtttttttttttaatgagtttttattttgtgaattttattttttttgttattttggttagtgggtaggagttttttttgggttagttattgttttatttgttgggttatgtggatttgttgagatattattttgtgttttatgggttagggttgggttaggataagggttttgttatttttttttattatttgttggtgggtggtggttatggttgagtggtgttttgtgattatgggttggtgttggttttttattgtgagaaagagttggtttgtgtattttttggtgttgatgagtagtttttgttttattttgagttgtggaagttggattgtgtgtaggataagagtgtgtttggtgagatagaagagtagaagtgttttattttggtttatttgtggatgtagtggatgaatttgtgtaatagtgagtgagattttttgttgttgttgttttggtttttttgggtgtttattttgggatatagaattagtgagtgttttttgttttaattttttatagggtgttgggtgggtattttagttaggagatagaagaagattgggtgttggttgggggttttttgttgtgttttttattaggtaggagttataaagtttgtaaagttttagttgtattgggagttatggggagtaagtgtgtttttttggggtgtttggttagagttggggttttaggatagggaagggagtaggagtttgtagttattggtttggttttattttgagtttttaattttttttttttagttttggtagggttttttaattaaagatggttttattaaaaatggagtgtgttatgtaagggggtagggggtgatgttgaagagaaagagttgagtttgtttgggattgtgtttttttgtgggtggggagttggggtaagatgaggtattaggaaaggggtggtagttagaggagggaggaggaataaggggaaggaagagagagggagtaggtggagtgagagagggagaaataggtgtggggttttaggttggattatttgttggttttaagttttaattgatgtttattagttggatttgaaagtgaggagttgttaatgtggattatggattgatttatgttattatggattaatggtttggatttattattgggttggggggatgatggggggtgggaataagatggatggaaagggagggaaagataagatgtaattaggaagagatatatttgattagtttttttttttaggtttaggtgggagtttaaattgtttttttttttttttatttagagtttagatagatggtataggtttaggagattaggagggaatttggagggggtgttggaggagtgtgaaatgggggaagggagttggtagaatagagggtattttggtattggttggagtttgtgtttgagggttgattaggggagggggttttgggtttggtgattgtaggttttagtatttttattttgtgtaataggttttttttttgggtttagtggttggtgaggttgttagatatatatatgttattagatgttggagttggagaaggagttttattataattgttatttgatgtggtggtggtgtattgagattgtgtatgttttgtgtttgatggagaggtagattaagatatggttttagaattgatgtatgaagtggaaaaaggagagtaaattgtttagtgtgttttagtttagtgttgaggaggaggaagaaaaataggttgagtgaaggtgttggaaagggagggaggatgtgaggggaaaggtttgtggggagttgagggtgttagagagatttgggaaggaaggtttttgggtgggggagttaggagatttgttttttggtgtagataggtggggtttagtgtttttttggatgtttttgtttgtatagtttttggtgggtgttttgaggttttattatttgagtttatttagtattttgtgtgttttttttttttgaggaatttgttttagtttgattaggttttttggtgagaattgaggagtggatttatttgatgttttttggaagtagagtaaaatgtttttgtttttgttgtgttttattttgtttatgttttttgtgtatggtttaatggtagatttgttgtttttttagtgggggttttgaagattttttgattttagatttgttgttttttttattttttttttaaagttattggaaggagtatatattatttagaagtaagaagaggagttttagaagaaaataaagttttattttattaattttttatgtgttgtgtttgtagttttgttttagttttggatgtgaaatattttgatgatgatgatgatgatgatgatgataataataataataataataataataataataataataaagatgtgaaaatttgatgtttggttatttttaatttttttttgttatttttttttttttttttaatttttagtttttttattttttttgagttagaattttttagtaaaggtgagagttttggtttgttgaagtgagttttgtttgattgggaagttatagttgagataaaggttggagtgattagttttgtttaggttttagtgttgtgtttttttggtgttgaggtttatagttgtttttttttgtgtagatttgggggatggagaggtgttgtgttttttttattttttagtttttttttgtgtatatatagtattaagggagttattgaggtttttaaagttttttggtggagatggagttatagtttgggggtttttgtagtgtttttttgtttttatttttgtagtgatttttggtttttggtttgtttatatggttaggtttttttgttagttttggttttttgtttttggtttgtggttttggagattgaaaaatggggttattgggtattttttattttgtagttgaaggttttaggtgtttttttttattttaagtagtagattagttttaagtaggagattagttttaagtaggggaatgtaaagttattagttaggtataggttgaaggttataatttttttttgttttttggagattttagggtaggaggttaggtgatggggtttttagtgttatttttttaatttagaatggtttattttttttttgtttgtattggtatttagaaggtaagttgtggttattgtttttttttatttttttgtttttttgtttttttttttatttttaaagaaaatagtttttttttaataggagattagttgtggtggtttttggttgtttagtgtgtttagtaaagtatgtgggtttttggaattttttttttgggaaggtggttgttattaggtaaatttttaaattgtttagttgtgagtgagggatttgtagtggggtttttgaatgtaatagttgaggaggaggggaagggattttgttttataaatttttagatatatgttattatttaaattaagtagtagatgtggtggttgttgtagtttttttggtaattaggttgtttagttttagttgtgtttggtttttggggtttttgttttgttttgttattttttatgtttgggttaaggattattaaggaggtttggaaggggattttgaatttttaagtggtttaggagaagtgaatgttttttttttttttttaagttttttgtttagttttgttggtttggtttgggtgttgtggattggtaatagtagttttattaggatgtaggttggattaagtttttggggaaaatttgttgtaataattgttttttatatataatttttaattttttttttatttttgtttttaatttggagatttgtaaagtttaagaaagggaaaagtaattttatttttgatttttttatttaaagttaaaataataatgataatgatgatgtagggagaaagaattaaatagagaggttaattttatttataagaaagtgggtaaaaagtttaatttttgttttaaaaggtttaattttgtggttgagttttggttgggttttttttttttttggtgattgtagggagtttgtagggagttagtagggaggtagttgtttgttgttatggtggttttatgtttgtgtttttgttggttgttgggaggtggtgtgttttgtttagaggttaaagttaattttttttttgtttttttttttttttttttttttttttttttttggaggtttgtattgaattggttttaatgatttttggattgttattatttgtaattatagagtatgaattattttttgaggttattagtgagaatttatgattggttaataaaagtatgtgattttttaatgttttttattttttttttaattttttttttatatttggttgtatatatagtaaaatgaagtatagtgtattgttataatttattaatatattataaattgtgaagtatagggttataatgattatgatttataaattaagttttttaaaattatttaaatgagtttgtattttgtaaatttttttttggggtgttatttaaatggtttggattattagttgttaaattatggtagtggtagttttttgagtggtttttatagggattttgttgttatgtatattggtttttatggttataattataatgggatggattttagtgttaattgttttttggttttttttagttattttggggtggtgggtgagagtttgtgtgttttttttgtgtttgtttaggagttttgttttaggtaagtggttttgagttgttttttgtttttgtttgagtttttgttttgtattaatggtgatagttatggtgttaagttttttgttttgtttttttttgattaggtgattttagttagttttagtgttaattttattgaaatagatgaggttagtgtgtttttggagtttgaggaagtggtaagttagttaagtagttttagtttagtttgggtgtagttagagtttatggttatttttatagttgtgtttgaggggtagattttgtaaatatttttttggatgaggaagttttatattagttatggtaatttttttttttttttttgtttttttggttttttttttttgtgttttggggtgggattggggggataaggagagtttggttttattttaaatatagatttatttttttaagggggagaagtatttaagaggggttttatagttttgtagatagagttaaaaagggtttttttgttaagaggggggtatttttaataatttgtttttagttttggtttaggtttttattagtgtagttgaattagttttaggataaaggatggggtttatataatgtggggaagggttttgtttatttttgaaattttgagattgttgttagtaaagaaggggtgaatagtaaaaggagttttttggggtaaaagtgtaattgttttttttttttttggggtgagtggttgtttgagtttagttaagggtgaggtattaggagtgagtaagagataaagttgggtgtattggttgtttgtagaagtgggggatgtagtagaaaggggtgtagaaattgagtttgaatgtgggtatttggagtagagaggattggagttgtggtgagttgggtgttgggatgtttgggttttgtttttttgtttttttttatttagtgtttttttttttaattggaataatgttgttttgtggtttttttttatttgttttagatatgattgggttggatgggaaaagggtttggattgtgtatatttgttattagattttggagttggaaaaggagttttattttaattgttatttgatttggtgatggtgtattgagattgtttatgtattttgtttgtttgagtgttagattaagatttggttttagaattggtgtatgaagtggaagaaggataataaattgaaaagtatgagtttggttatagttggtagtgttttttagttttgagtttgtttagaggagtttagtggtttaagagtttgtgttatttttagttttggtttttttaattttttttgttttgttgttgtttgttggggattggtttttataagtttgttttgttttgtgttatgatattttgtttggtt

SEQ ID NO: 251 - DNA, 11656 bp, Artificial Sequence
  chemically treated genomic DNA (Homo sapiens)
gttattgtttggtaggggtttgtttttttttttggtgttgtttatttgtgaggtttgagatgtggattgttattttttttgggtttagtttggttttaatgtaggttttagagagagggataaaatttggtttgttttttttttttttttaaggtgattattagtgttttgggggtttatagggtttttttagttttgatttgagtttttggttgtagttggtttgggtttgtgggggttttgtgtagggaagtggaggttttttttttaggtttttatatttttttggtttgttttagtagagttagtggttttttgagatagttgggttttgtagtttttagttgaggtttgttgttgggagaaagaagaatgaatgaagggtggaaggggtggggaggggtggggtgtgttgtgttagtttgtggtgtttttaggttgggttgtagtggggtgtggtttttagaggtgtggttttgggtgtgggggtggggttttttggtgggggtggggttgtgtagggttgtttttgttgttggttgtttgtgttttgtttttgtgttgtagtttataggttttgttttggtttgtttttttgtttgttttttaagttgttgtggtgttgagttggtttttttgttggtgtttgagaggtgtttttggtttggtttggtttggtttgtgttttttgtttttgtttttttgggttggtggtggtgggtgagtttgtgggtttggttgtttttagttttagttttgttgggttttgttttttgttgagtgtatgaggttgatgttattttgttgtatttggagggaagaatgtatgggagaggaaggtgtgtgggttgtggggtgtggggtgagggtttggagggggtgtttggggtagtgtggggtatgggagggggttgggtttgttaggaggttgtgtttttgttttttttgggatgagtttgtttttatgaagtttgtaggtttttttttgttttttttttgtttgggatttttttttttggtttttggtgagttgtttttttgtgggtttgggggtttttggatttttttttttttttttatgtttttttgtgaaggatttttagatattgtttattttgtgttggtttttatttgtgtgttttgtttattatttgggttttgttttggggttattttttatttagttttggaagaaagagtggttggggaagttgtagttttgggttttagtggttgttgggtgtttgtttggttttgtgattttgagttaggtgttgattttttggtttttagtttttttttttgtatatttggaaattgggtagttgtttttttggtgttggtgattgggggttagatgggtagagtggagataggtgtttaggaagttggaggttgtgtattgtgggagttttatttattttttttgtttgtgttttaaatttggtgtttgtttttagttttggttgggagtatgatttattttaattttttttttagtttttttttttttattggggtttaaggtgtagtattgtattgtagttagggtttaaggatttttttagtttaggatagggtttgggggtttttttttggattttttttgttgatttgttatttagatttatttggttttaaggtagggtttgattttatatttttttttgttattaattttttttaggtttatgaaaatttgattggggtaggggtttatttttttgtagtttttgtttatttaaggtatttgtgtttttatagagggttaggttgttgtggttttgggatttagttatgtgattgggtaagttatgttatttttggggtttagtttttttttttgtatagtggagaggggtaggtttggggtattttttagggtttattagttttaagggtgttaggttttaaggatgattaagtatgtttgtggttggttagaggaggtgttaggtttttttgggataggtgtttgggagtatttaggtttgtagttttttttttttgttaagttagggtatttattgttaaggatttgttagggttggtatttttaggttttttgtttttgattttttagttggttttagtttaggatgtattaatttagttttgtttagtttttgtttttgaagggtttttttagtatttttttttgggtaggagagggaagaaaggaggttgtgataggaatgttatttattgttttatttttaaagttattgttttttttttttttatttattttgttagatttaatgttatagtgggaggatggatttgattttttttttaagttgatatatagggaaatagggttagagaagtttggtaatttagttagtattttagtaagatttaggttagtgttttttttttttttatttggtatagtgattgttttgtttgggtgttgtatatgtgtagtgtgtgaggattggtgtaggtgtaggtatatgtggggtgggtagggtaagttgggtttgtattagattatattttttgagaatgttttttaattttttttttattttgtaggaagtgagttgtttgtgtgtgtaagttgtggttagaggatttatgatggttagtatttttaggttttgaatgtggattggtatgtagattgttttaggtagggtggggtgtttagggtttgtgttgttttaaataaggtttgttagagaggataggttggttaaggaatgggggaggttgggatatgttttttggtgttgttttttattgtgattttgtggttttaatttattatttatgatatgaggtgttttgattagaaaatttttataggtttttttgttgttattttatttatttatttttttttttttttgagatggagttttgttttgttatttaggttggagtatagtggtgtgattttggtttattgtaattttttttttttgggtttatgtagtttttttgtgttagtttttggagtagttgggattataggtgtgtattattatgtttagttaatttttgtatttttagtagagatgggttttgttatgttagttaggttggtttgaaatttttgattttaagtgatttttttattttagttttttaaagtgttgggatgatagatataaattattgtttttggttttattttatttttttttatgtatttttttttttttgaaatggttttgttttgttgtttaggttggagtgtagtggtgttattttggtttattgtaatttttattttttgggttaaagtgatttttttattttagttttttgagtagttgggattataggtatatattataatgtttagttaattttttaaattttgtgtaaagatagggttttattattgagatttaggttggttttgaatttgtgattttaagtaatttttttgttttggtttttgaaagtgttaggtttataggtgtgagttaatgttttggtttttgttgttattttagatttttgagatttaaattttagagaggatgggagagatttttaattgagttagtgtttgtaatttagttttttgttggtatttagatagggggaagagttggaaggaatgttttttttgttttttgggtgtttatgtttttgtagggagggaagataaattaggttttaagggaaattaggttatttttagtgttttttaggttgtttgtgaatatgtataatttagttatattagttttagtgtttagatatatatttataggtaggaagaaagtagggttagggttgtggtggaggataaagagtatatgaggatttgaaggttatttagtaggattattttgagaagttaggagtaggggtttatttgttttgagttagagtagggttagagtaggggttttaaaggatgtgagattttttgggtagaaaagtagagtggaggtggggtgtggtggtttatatttataattttattattttttggggttgaggtgggtagattatttgagtttaggagtttgagataagtttgggtaatatggtaatattttgtttttattgaaaatataaaaaattagttgggtgtggtggtgtatgtttgtagttttagttatttaagaggttgaggtggtagggttatttgagtttgggaggtggaggttgtagtgagttatgattgtattattgtattttagtttgggtaatagagtgagatttagttttaatttttaaaaaagaaagaaagaaaaataaatggtgtgggagagaattataggtatagttattaaatagtaaggtttaggggagaaaattttataaaagggtagaaggtgaagtttttgggatgtttagtaggggttaagatatttattattaggattttattttaggtttttgttttggtttattttttggtttttggtttttttgagatagttttgttgtgttgtttaggttggggagtagtggtgtgatttttttttattgtaatttttgttttttaggtttaagtgatttttttgttttagttttttaagtagttgggattataggtgtgtattattatgtttggttaagttttgtatttttagtagagatagggttttgttatgttggttaggttggttttgaatttttgattttaagtgatttgtttgttttagttttttaaaatgttggaattataggtatgagttattgtatttggttttggtttgtttttttgtttttttttttttttttttttatatagggttttgttgtgttatttaggttggtgtgtagtggtgagattatagtttattgtagtttttagttttaattggtttaagtgatttttttgatttagttttttaaagtgttgggattataagtataagttattatgtttagtttgtttttttttttttaggaataatgtttaatgttttttaatatttagtaagggataatttttgttttaagtattttgtatagttagatattagtgttgtttttgttttgttagagagaaaattgggatatagagaggttaatttttttgatgaaagttatatagttagtgagtgaaatgaatatatttagtgtggttgaaaggagatagatagtatgttttgggattttgtattaggtgtttagaaagaggtttttggggggtaagagggtttttaataggtagaggaaattatttgtatagtggtgggatggtgtggattgttgagggaataggaatagtttttttggaaggaatagaataagttgagggatttaataagaaataaagttgagattgatttgtgaagggttttgaatgttaagataaggagttttagaagttaggatgggggtggtggtttatttttgtaattttagtattttgggaggttgaggtaggtagattatttgattttaggagtttgagattagtttggttaatgtggtgaaatttttgtttttattaaatatttaaaaattagttaggtatggtggtatatgattgtaatttaagttatttgggaggttaaggaaggagaattatttgaatttgggaggtggaggttgtagtgagttgagattatgttattgtattttagtttgggagatagagtgagattttattttaaaaaaaaaaaaaaaaaaaaatagaagggagttggtagaaagttagggaggggttggggtgatatgttgttgaagaatgttattttagtgggttggtggtggtatttaggtagggaagggattgttttagtaatttaagggtttgagtttataggatttgatttgggatagtgattgaggatggagagaattttaggtagaagggatagtttttggtgagtatttgttatattggttattatgtattgagtattttttatgttaatttgttaaatttttattataattttatgagggattgtatgtgtttagtttgtatgggagaaatagagattttatgtaattaagtgttttgttgaaggttgtaatatttagagttgggattaaaatttttttattttatattgttatagagtaggaaaggtaggggttggtggtggtatatgtttataattttagttttttgggaggtggaggtaggtggattttttgagtttaggagtttgagattagtgtgggtaatatagtgaaattttgtttttataaaaaaattagttgagtatggtggtggtgtttgtagttttagttatttaagggtgttgatatgggagggttgtttgagtttgggaggtggaggttgtagtgagttatgattatattattgtaagttagtttgggtgatagagtgaaattttattttaaaaaaaagaaagaaaggaagaaagaaaaagataggggttttggggagggtatgggtattggtgaatggtagggtggaatttgaagttatttggttttttaatttgggtattggggagttggtggtttgttgattttgatggaattgggggttatgttggggaggagatatgtttatttgtgttgagttggaggggatatgggttatttatggtggttgtgttttgtttagagttagttatgggagtttgagtttagttggaggtaggaaagttagaaaaaatggttgttttggagttggttttgagatggtgagtgggatttgtgatagggttaagatgaatgaagggaagaattttggggatttttgtgtttgtggtgaggggggagatggagttttgggtgatggagagagggttaggagtagagttatagaagttataggagggaagttgtgttataggatgggtgtatttggttttggagtggtttgttttaaattatttattaggagaggggtgagtttttaggttagggtagtaaagaggaggtatgtttgtgttgtttttggtgtagtgaaatttaagaaggaagttaggtgtagtggtttatgtttgtaattttagtattttgggaggttaaggtaggtagattatttgaggttgggagtttgagattagtttggttaatatggtgaaattttatttttattaaaaatataaaaattagttgggtttgttggtgggtgtttgtaattttagttatttaggaggttgaggtagaagaattgtttgaatttgagaggtagtgattgtagtgagttaagattgtgttattgtattttagtttgggtgatagagtaagattttattttgaaaaaaaaaagttttaatatggggaaagatttattagaagtaagagttatggtttttattttgtggtttgtgggtgtgatatttttaatagtttttaaagttggtggtttttattgtgtgatagtgagtagagtagtttagagggggttattgtttatttgggtgtatggttgattatagttaggttggtttttagtgggatgtttaaggtgttagattttgtttagttttttttgggttttgggtttgaggtattgggtttggtttagattttattttatgtattgagatttttgttttagggttttttatttttttgaaggtgtttgggtaggggtaatgtgataaggttatgaggggtttgtagtttttagttttattggggaggtggttagtgatttttatttttttggtttttttgtatgttttttttagtggaattttttagggtttttgagttagttatttgtaaataattatggtgtgtttattttgtattaggttttttttataataatttagtaagggggtgttatttatttattaaagtgattttttttttgagttttgttttgttgtttaggttggagtgtggtggtgtaattttggtttattgtaagttttgttttttgggtttatattatttttttgttttagttttttaagtagttgggattataggtgtttattattatatttggttaatttttttttgtttgtttgtatttttagtatagatgaggttttgttgtgtgagttaggatggttttgattttttgattttgtgatttgtttattttagttttttaaagtgttgggattataggtgtgagttattgtgtttggtaatattaaagtgattttaaggttaaggttggtaatttatgtttgtaattttagtattttgggaggttgaggtaggaggattgtttgaggttaggagtttgagattaatttaggtaatatagtgagattttatttttataaaaaaattagttaggtgtggtggtgtgtatttgtagttttagttatttaggaggttgagatgggaggattatttgaatttaggatgttgaagttgtagtgagttgtgattatgttattgtattttggtttgggtaatagagtgagatattgttttaaatttttaaaaagtgattttataaatgaggtgtagagtttagttatttgttaaaagttttatagtgtgtgaggagtagaattaggatttgaattgaggtagtttggttttagagtttatagtgtaattatagtttagttttatattttttagattaatagggtttttgttttttagtgggtaagatatttagtgaataaatgtagtgttaggtattgggggatagtatttttaggaagtgatgtttaagggatagaattgaagggagtagtgtttagaggatgttgggggtagggttggtgtatgtgtaaaggttttggggtgggaatgtgtttggtataattgaggattataaagttagtgtgtgggagtgtagttagtggttaggggtgtatagagttttgtgggttttgtggaaggtgttgttggttgtatagttttttttttttttttttttttttttttttgagatagagttttgtttttgttgtttaggttggagtgtagtggtgtgattttagtttattgtaatttttgttttttgggtttaagtgatttttttgttttagttttttggtagttgggattataggtgtttattattatatttggttaatttttgtgtttttaatagagatggggttttattatgttagttaggttggttttaaatttttgattttaagtgatttgtttattttagttttttaaagtgttggggttataggtatgagttattgtgtataggtagttgtgtatttttgaatgttataatttgagtatttgagagttgtttttgttttttggtttttgtttttgaggaagttttatgttgataggatagatagggttataagtgttgtgatgggggtttgtaggttgttggagggtttagttgggattagatgttgtttttttttgtagagtgggataattgttgtaggtttatgggatttttggtattagttttgagggttgttattttggggtttgtttttttttgtgttttgattttttagttttttgtaggttttgttttttggaaggttatgattaggtttggattggtttaggtttttttttggtttatatattgtttttgtgaggttttttttaggaagttttttgtgtataatttttagggttgttgtatttttggtagtatttttttggtagttgggtgggttggttttgggtaaggagggttgagtatgttgttggtttgtggggttggagtagtggtgggatgtaatttttttttttttaggggatttttttggtgaagataaattgtttataggaagttgatttttgtttttttgggggtagtagtggaagaggtagttgtttttgagtttgtttttgtttttagagaagtttgaggtttttagtgttgttgttagggttgaggttgaggagtttatagtgtgtgtttaggattgagggttagggatgggttataggttttttgtttggggtttaagtttagattgtttgttttttatttgtattaaagtttaggtaaagggtgttttagttattttttgttgtaggtttagattaagttttttggtatttatgtggttgtagtttttttttgtgtgttgtagttatgttggttttattttttgtagtttttaattttgagtttttgagggaggatggggaagtagttggtttggttatttttgtttttttttagatttttagagtttttagtgtagttatagaggatgttgttggttttagttttaagaagatgttgttttttttagagggttaagtaagtgggaatttttttttttatttgttttgggttttaggtagggtttttggtgtaaggtttggggttggaagttgatttatttaggtttaggttttggggtagaattgaaattttttggttattgttggttgtagtttgggagtaggttattgttaaagttgtgggtttttttaggatagtttttttatgaggttggttttttatttgttgtttttttatatttggtggttagggatgtggttttgggtagaatgatgattttttatttttgttattatggaagttattgttgttttttagtttagttagttatttgggttgtagagtattttttttatgttttttgggtgtttttttttttttttgttttagtttggttttgttttattttgtttttagggaggggtattttggagtggggttagggtatggtttttttttgagggagtttttttttggttgtttttagggtagttttgtatagttttagtatttggtgtattttttttgatattttttttagggatagttaggtattttgtgtggggtatttaagagagttaggtttgttagtttttagtttttgttagaatgtaggtttgaggggtgaggggtggggtaggggtagggataggaattttggtgtgttttttatttgtaaaggtttattgaggttttgagttttagttattgagttattaagttagtttgggttaggtttgggtgttttgtttgtaatggaggtagagatggggttttggggtagttttgaggatgttgggtgtatagtgggggttttgttggtaggaattatttatgtttttttttgggttaagttttgtggatgtttagtttggggttgtggggagttggtaggttagtggtagatattggtgggtagatttagtgtttggtagaataggtattaaggaagtggtgattggagggaagttaagtgtatttaaatttttgggtgagttattattgttgggttttttatagttgttgaaagtgagtaatagtgatgaaggtttgtgagtttttgtgtgagtgagtgaatggattagtagtagtttttaggttgtggaagagtgttttttttttgggatggggatatttggttatagtaatttttaattttttatttatttattgtttattgtagaggtatgtgggggttttgttttttgtaggtaggagtgaggggtatttttgtgatgtggtatttttgtgattgaggttatgtgtgattggtgtaagggtaggaagtgagttattggtttgtattaggtgtgggggtttttgtgagggtaggatttaaagttggtttggttttttggttgtagtattttttttttttttgaattaggttagagttttgggatgggaggtgttttgtagattattttttttattaatttttgttttttgttttatttttgtggtgatttggtgaattgttggttttttgttgtgtattgagtggggtagtgattttgatgtggtgttttttgttgtttttgttattgttattatttttggtggtttagtttttgtatt

SEQ ID NO: 252 - DNA, 11656 bp, Artificial Sequence
  chemically treated genomic DNA (Homo sapiens)
aatgtggaggttgggttattggaggtggtggtggtggtaggggtggtaggagatgttatgttagggttattgttttatttggtgtatagtagggggttggtagtttattggattattgtgggggtggggtggaggatggaagttggtgaggggggtggtttatagggtattttttgttttagggttttaatttaatttgaaagggaaaggagtgttgtagttgggaggttaggttgattttgggttttgtttttgtagaagtttttatgtttggtgtagattaatgatttgttttttgtttttatattgattatatatgattttggttataggggtgttatattataggagtgttttttatttttgtttgtaggaagtagggtttttgtatatttttgtagtgggtggtgggtgggtgggggattaggaattgttgtaattaagtgtttttattttggggagggaatgtttttttataatttggaaattgttattggtttatttatttgtttatgtagaaatttataaatttttattattgttgtttatttttagtagttgtgaaagatttggtggtgatgatttatttgagggtttgagtgtatttggtttttttttggttattatttttttgatgtttgttttattagatattaggtttgtttattagtgtttgttattgatttgttagttttttgtggttttaggttgggtatttataaagtttggtttaggagagagtataagtgatttttgttggtgaggtttttgttgtgtatttagtatttttagaattgttttgagattttgtttttgtttttattgtagatagggtatttaggtttggtttaggttgatttggtggtttagtggttggggtttggggttttagtgaatttttgtggatggagagtatgttggagtttttgtttttgtttttgttttgttttttattttttaggtttgtattttggtaggagttagaggttgatgggtttggtttttttgagtgttttatatagagtgtttgattgtttttaagaaggatgttaagggaggtgtgttaggtattgaggttgtgtagagttgttttggggatagttagagaggaatttttttgggggagagttatgttttggttttattttagggtatttttttttgagagtagggtaggataaagttaggttggggtaggagaagggggaggtatttggagggtatgaaaggggtgttttgtagtttaggtggttggttgggttgggagatagtggtggtttttataatgataggagtggagaattattgttttatttagggttatatttttggttattaggtgtgaagaaatagtaggtggaggattggttttatggggagattgttttggaaggatttatagttttggtagtggtttgtttttaggttgtagttgatagtaattaaggagttttagttttgttttagagtttggatttaggtgggttggtttttagttttaggttttatattaggggttttgtttggagtttaggataagtagggagggggatttttatttatttagttttttggaggaagtggtgtttttttggggttgaagttaatagtattttttgtggttatattgggggttttggaggtttaagggagggtaggggtggttagattagttgtttttttatttttttttaggggtttaggattggaggttgtagagggtggggttagtgtggttgtagtgtataggaggaggttgtagttgtgtgggtgttaggggatttggtttgagtttgtaataggaagtggttgaagtattttttgtttgggttttggtgtgggtggggagtgagtgatttaggtttggattttaggtagggagtttgtggtttgtttttggtttttagttttgaatatatgttgtaggttttttagttttggttttggtaatggtattgaaggttttaggtttttttggggatagggataagtttaaaagtagttgttttttttattgttgtttttaagggaatagaggttgattttttatggatagtttgtttttgttaaaaaggttttttgaagaaagggaggttgtattttgttgttgttttaattttataggttagtagtatgtttagttttttttgtttagggttagtttatttagttgttaaggagatgttattagggatgtggtagttttgggggttgtgtataggaggttttttggaggggattttgtagaggtagtatgtgagttaaagggaagtttggattagtttaagtttggttataattttttgggaggtagggtttgtaaggggttgggaggttagaatatagaaaggggtaggttttggagtgataatttttagggttaatattagaggttttatgggtttgtagtaattgttttattttataaagaggggtagtatttggttttggttgagttttttagtagtttgtaggtttttattatagtatttatgattttgtttgttttattagtgtgggatttttttaagagtaggggttaggggataggagtagtttttagatgtttaggttatgatatttaaagatgtatagttgtttgtgtgtagtggtttatgtttgtaattttagtattttgggaggttgaggtagatagattgtttgaggttaggagtttgaggttagtttggttaatatggtgaaattttgtttttattaaaaatataaaaattagttaggtgtggtggtgggtgtttgtagttttagttattaggaagttgaggtaggagaattgtttgaatttgggaggtggaggttgtagtgagttgagattatgttattgtattttagtttgggtaataaaagtgagattttgttttaaaaaaaaaaaaaaaaaaaaaaaaaaaaagttgtatagttaatggtattttttatggggtttataaggttttatgtatttttggttattgattgtatttttgtatgttggttttgtggtttttagttgtgttaagtatatttttattttaaggtttttgtatatgtattggttttatttttgatattttttaaatattgttttttttaattttgttttttaaatattattttttgagagtgttgttttttaatatttgatattatatttgtttattgagtgttttgtttattagaaggtagggattttgttggtttgggaggtgtgggattaagttgtggttatattgtaggttttgaagttaggttgttttggtttgagttttgattttattttttatgtgttgtgagatttttggtaagtgattgaattttgtattttatttgtaaaattgttttttaaaaatttgagatagtgttttgttttgttgtttaggttagagtgtagtggtgtgattatagtttattgtagttttgatattttgggtttaaatgatttttttattttagttttttgagtagttgggattataggtatgtattattatgtttggttaatttttttgtagagatggagttttattatgttgtttaggttgattttaaatttttggttttaagtagtttttttgttttagttttttaaagtgttgggattataggtgtgagttattagttttggttttaaaattgttttaatattgttgggtatggtggtttatgtttgtaattttagtattttgggaggttgaggtgggtggattatgaggttaggagattgagattattttggtttatatagtgaaattttgtttgtattaaaaatataaataaataaaaaaaaattagttgggtgtggtggtgggtgtttgtagttttagttatttgggaggttgaggtaggagaatggtgtgaatttgggaggtagagtttgtagtaagttgagattgtgttattgtattttagtttgggtgatagagtgagatttaaaaaaaaaattgttttaataaataaatagtatttttttattgggttgttgtgagaggggtttaatgtagagtgggtatgttataattatttgtaagtgattgatttagggattttaggaagttttattgggaggggtatgtagaggggttaggaaagtggaaattattggttatttttttagtggggttggaggttgtagattttttatggttttattatattgtttttgtttgaatatttttagaggggtgaggggttttggaataaaggttttagtgtatgaaatgaggtttgggttgggtttaatgttttaagtttagggtttgagggagattaagtagagtttagtattttgggtattttattgagagttagtttggttgtggttagttatgtatttaggtgagtagtgattttttttgagttgttttgtttattgttatgtggtgaggattattagttttggggattgttgggagtattatatttataagttatgaggtagaagttatggtttttatttttagtggatttttttttatattgagattttttttttttgagatggagttttgttttgttatttaggttagagtgtagtggtgtgattttgatttattgtaattattgttttttgggtttaagtgatttttttgttttagttttttgagtagttgggattataggtgtttattaataggtttggttaatttttgtatttttagtagagatggggttttattatgttggttagattggttttaaatttttgattttaggtgatttgtttgttttggttttttaaagtgttgggattataggtgtgagttattgtatttggttttttttttgagttttattatattagggatagtataaatatgttttttttttattgttttgatttggggatttattttttttttggtgagtgatttgggataggttattttaaagttaggtatatttattttgtaatatggttttttttttgtggtttttgtggttttatttttgattttttttttattatttaaggttttatttttttttttattgtagatataggggtttttaaagtttttttttttatttgttttggttttattataaattttatttattattttagggttagttttgaggtggttgttttttttgatttttttatttttaattggatttaggtttttatggttagttttgggtaggatatagttattatggatagtttatgttttttttagtttaatatagatgagtatgttttttttttaatatgatttttaattttattagagttaataaattattaattttttagtgtttaggttagaaaattagatggttttaggttttattttgttatttgttagtgtttatgttttttttgaagtttttgttttttttttttttttttttttttttttttttgagatgggattttattttgttatttaggttggtttgtagtggtgtgattatagtttattgtaatttttattttttaggtttaagtaatttttttatgttagtgtttttgagtagttgggattataggtattattattatgtttagttaatttttttgtagagataaggttttattatgttgtttatattggttttaaatttttgggtttaagagatttatttgtttttgttttttaaagggttgggattataggtatgtgttattgttagtttttgttttttttattttgtggtgatgtggagtgagaaggttttagttttagttttagatgttataatttttagtgaggtatttgattgtatggaatttttgttttttttatgtaaattgggtatatatagttttttatagagttatgatgaagatttaataaattagtatgaagagtgtttaatgtatggtagttaatatgataaatatttattaaaaattgttttttttgtttgaaattttttttatttttagttattgttttaggttaggttttatgagtttagatttttgagttattgggatagttttttttttgtttagatattattattggtttattgggatggtattttttaatagtatgttattttagtttttttttggttttttgttgatttttttttatttttttttttttttttttttgagatggagttttgttttgttttttaggttggagtgtagtgatgtgattttagtttattgtagtttttgttttttaggtttaagtgattttttttttttagttttttgagtagtttggattatagttatgtgttattatgtttggttaatttttgaatatttagtagagatgggggttttattatgttggttaggttggttttaagtttttggggttaagtgatttgtttgttttggttttttaaagtgttgggattatggggatgagttattatttttattttgatttttgaaattttttattttggtatttaaggttttttatgaattggttttaattttgttttttgttggattttttagtttattttgttttttttaagggaattgtttttgtttttttagtagtttgtattattttattgttgtgtagatggttttttttgtttgttgagagtttttttgttttttgaaggtttttttttgagtatttgatgtagaattttagggtatgttgtttgtttttttttagttatattgagtgtgtttattttatttattggttgtgtgatttttattaagagaattaatttttttgtgttttaattttttttttggtaaaataaagatagtattaatatttaattatgtaaagtatttagaataggggttgttttttattgaatgttagaaaatgttagatgttatttttaaaaaagaaaaaataggttgggtatggtggtttatgtttgtaattttagtattttgggaggttgagttagaaggattgtttgaattagttggagttggaggttatagtgggttatgattttattattgtatgttagtttgggtgatatagtaagattttgtgtaaaaaaaaagaaaagaagaaataaaaaaataaattgaggttaggtgtagtggtttatgtttgtaattttagtattttgggaggttgaggtgggtagattatttgaggttaggagtttgagattagtttggttaatatggtaaaattttatttttattgaaaatataaaatttagttgggtgtggtggtgtatatttgtaattttagttatttgggaggttgaagtaggagaattgtttgaatttgggaggtggaggttgtagtgaggagggattgtgttattgttttttagtttgggtgatataataagattgttttaaaaaaattaaaaattaaaaaataaattaaggtagaagtttaaaataaagttttagtggtggatgttttgatttttgttgggtattttagaagttttattttttatttttttatggagtttttttttttgaattttgttgtttggtgattatgtttgtaatttttttttatattatttgttttttttttttttttttttaaaaattgagattgggttttgttttattgtttaggttagagtgtagtggtgtgattatagtttattgtagtttttattttttaggtttaagtaattttgttattttagttttttgagtagttgggattataggtatgtgttattatgtttggttaattttttgtatttttagtggagatagggtgttgttatattgtttaggtttgttttgaatttttgaatttaagtgatttgtttattttagttttaaaaagtgatgggattataggtgtgagttattatgttttatttttattttatttttttatttaggaaattttatattttttgagatttttgttttggttttgttttggtttaaggtaggtagatttttgtttttggttttttaggatggttttattgggtgatttttaggtttttatgtattttttattttttgttataattttgattttattttttttttatttgtgggtgtgtgtttggatattggggttggtgtgattgggttatgtatgtttgtaagtagtttggaagatattgagggtggtttggttttttttaaggtttggtttgttttttttttttgtaagagtatgaatatttagaaggtaggagggatattttttttaatttttttttttgtttgggtgttagtagggggttgaattgtaggtattggtttaattggaggttttttttattttttttaagatttagattttagagatttaggatgataatagaggttaaggtgttagtttatgtttgtaagtttagtatttttggaggttaaggtaggaggattgtttgaggttataagtttaagattagtttgggttttaatagtgagattttgtttttatataaaatttaaaaaattagttgagtattgtggtgtatatttataattttagttatttgggaggttgaagtaggaggattattttagtttgggagatggaggttgtaatgagttgagatggtattattgtattttagtttgggtaatagagtaagattattttgaaaaaagaaaaatatataaaagaaaataaaatgaggttaggagtggtggtttatgtttgttattttagtattttgggaggttgaggtgggaagattatttgaggttagaagttttagattagtttggttaatatggtaaaatttgtttttattaaaaatataaaaattagttgggtgtggtggtgtatgtttgtaattttagttattttagaggttgatataggagaattgtgtgagtttaggaggaagaggttgtaatgagttaagattgtattattgtattttagtttgggtgatagagtgagattttgttttaaaaagaaaaaaaaatagataaataaaatgataataggaaggtttgtagggattttttagttaaaatattttatgttataaatggtaaattaaggttatgaagttataataggggatggtattaggaggtatattttggttttttttattttttgattagtttgttttttttggtaggttttgtttagggtaatataggttttgggtattttattttatttgaagtagtttgtgtgttagtttgtgtttagggtttggaggtattggttattatagattttttggttgtagtttgtatatatgggtaatttgttttttgtagggtgggaagggagttgggaagtatttttaggaagtgtgatttggtgtaggtttagtttgttttgtttattttatatatatttatatttgtattaatttttgtatattgtatatgtgtagtgtttaggtagggtagttgttgtgttaaataggagaagaaagggtgttggtttgagttttgttgagatattgattaggttgttaagtttttttggttttgtttttttatgtattagtttaggaggaggattaggtttatttttttgttatagtattggatttggtaaggtaaatgaggagaaaggaagtagtggttttagggataaggtagtgggtgatatttttattatagttttttttttttttttttttgtttaggaagaagtattaagagggttttttaaaggtagggattggatagggttggattagtgtattttgggttgaagttagttgggaggttaagggtaggaagtttggaggtgttggttttaatagatttttggtaatgaatgttttggtttggtaaggggagggggttgtagatttgggtatttttagatatttgttttagggaggtttggtattttttttagttagttataggtatgtttagttatttttggggtttggtatttttggagttggtgggttttggaaaatgttttagatttgtttttttttattgtatagaaggggagattgagttttagagatggtatggtttgtttagttatatagttaggttttaaggttataatagtttgattttttgtgaagatgtaggtattttaggtaggtaggggttataggaaggtgggtttttattttaattaggtttttatgggtttgggaagagttggtggtagggggaggtgtggagttaggttttgttttggggttaggtggatttaagtgataggttagtgaaggagatttaaggaggggtttttagattttgttttaggttgggggagtttttgaattttaattgtagtgtagtattgtgttttgggttttagtgagggagaaggggttaaagaggaggttaggatgagttatgtttttagttaagattgagggtaggtattgggtttggggtatggatagggagagtggatgaggtttttgtagtatatggtttttggttttttggatgtttatttttgttttatttatttggtttttaattattgatattgggggggtaattatttagtttttaaatgtatagaaggggaaattgaggattaggaagttagtgtttggtttaaggttatagagttgggtaggtgtttggtggttattgggatttggggttgtggtttttttagttgtttttttttttgagattggataaagggtggttttagggtgaggtttgggtggtggatagagtatgtggatggaggttgatgtggggtgggtagtgtttgggagttttttgtggggggatgtgggaggaggaaaaagggtttaggggtttttagatttgtaggagggtagtttgttgggggttggggagggggattttgggtgggagggggatagggaggggtttgtgggttttgtaaggatgagtttattttggaggaggtaggggtgtggttttttggtagatttggtttttttttgtgttttatgttgttttgggtattttttttaggtttttgttttatattttgtggtttgtgtattttttttttttatatgtttttttttttaggtgtaataaagtagtgttaattttatgtatttgatggggggtggggtttggtggggttggggttgggggtggttgggtttgtgagtttgtttattgttgttggtttggggaggtgggggtggagggtgtgggttgggttgggttgggttgggggtgttttttggatattggtggggaaattggtttggtgttgtggtggtttggggagtgagtggaggggtggattgaggtggggtttgtgagttgtggtatgggggtggggtgtgggtggttggtggtgggaatggttttgtgtggttttgtttttattagaaaattttgtttttatgtttaaggttatgtttttagaggttatgttttgttgtggtttggtttgggggtgttgtgagttggtgtggtgtgttttgtttttttttgttttttttgttttttatttattttttttttttttagtgataggttttggttgggagttgtgaggtttagttgttttggagggttgttagttttgttggggtaggttaggaggatgtaggagtttagagaaggggtttttgtttttttgtgtgaggtttttatagatttaaattagttgtagttgggaatttggattagagttggagaggttttgtggatttttaggatattggtggttgttttggggaggggagggaggtgggttgggttttgtttttttttttgaggtttgtattgaggttaggttgggtttggggaaggtgatggtttgtgttttaggttttgtgaatgagtagtattagagaaaggagtgagtttttgttaggtggtgat

SEQ ID NO: 253 - DNA, 13705 bp, Artificial Sequence
  chemically treated genomic DNA (Homo sapiens)
gatgggaaagggagggtgagggttgggggtggggattgtatgaaatggaggtgtttgattgtgaagggggttttttttgtgtggttatggggaggagtttggggaggttagtgtgggtggtagttttagggaggttgagagtattgttaggtttggggttgtgatgttgggtggatttggtagggtttggaatttttttttggttggtttgggttggggtggtgggaggggagaggttggattgtttttttgtagtttttttttattgagttaagaggggttttgagggaggatggaggtagggaaggaatagttttggttttatttagtttatttgtagatattttatttatatatagatttgaagttatgtaatatattttgattttgatatatattttaataaattagatgtattagtttatggttattttaatttgtagatattatttatttagatggatattttaaaatttagaatttttagtttataaagatatattttttatttagaggtatatggtatattttagatatggttaatttgaagatgtaaattttattatatataaatatttagtttatattttaatttaaatatatattttgaattgtaagttttaaagtataaatatattaagttatataaatttttgatttatgatgtttgggtatatagatgtaatttaatttaagtaatattttagtttattatggatgtttttttttagatatattttaaatttagaagtttagtattttaagtttatagaaatgttttaggataattttgtgttgttatatgtatgtagtggagtagagatatttttgttttagtttgggggtttttttaagtgagtttaggtttttttagataaattattattagattagggagaggagtgaatttattggatgagttattttttttttttattggtattagtttttatgtatttgagtttttggttgtgggttatggagttggtgtttgggaatgggatttgtttatagggagttagaaagtagtttttagttttagttttgtgttaatttgttgttagattttggaaaagtttagttttttttaggtttttttttttttgggtttttgtagtgtagtagtattgggaaggtttttttggttgtttatgtggtgggggagtagtgtggagtgtatttttatttaatttttgttttgtgtagggatttttgtaatttttgttttttattttagtgtatattggaggaggggaattgaaggtaaatgtaggggttggggttgtttgtttgtgttttttagagttgggtttttttttttgttgtgtgtagttgtgattgtatgtatgtgtgtatgttttgggagagtttgtgtgtggggtttggggagggggtggtttttaggttgagttatgagagtttgggtttttgtggtaggagttgggggttggtaagttttagttttgttttttttttgattttggattttgttgttgattgggttttttattttttttttttagtgatttttattttgttttgttttttattttgagtagttttttagggaagttgttgttattattgaggttttttaggtttttgatgaagtttttgtaggttatgtgttttttgatgttttaaggaagggaatggaggtttgtgagtttggagggtttttggttttttaggttttgtatgtttggttaggggtttgttttttggtttttgtttgtttgtttttatttatatggttgtggagatttgtgttgagtagtatgagtgtataggttagtgtgtgggtgttgtttaggggagagttgatttttagttttggttgttttttagggattttttttatagttattttttttaattttttattttatttttattttttttggttggtaattttttattttttgaattttgttagtaaattttttttataaagagttttttttttagtagatttgttagtaaggatttgtttttggtttttttaagtattgagggttagttgttttaatgtattagttgttttaatgtttttttgtttttaagtttggattatgagaaagtgaattgtagtatagttttgtagattagtgtagttaaatagaattttttttttagttaagtattggtttgtataggtatgtaaatttttgtttttttataatatatttaattttagtaatatgtttgtttatatgtatagttttatatatatgtagttatgatagtgttgtttgtatatatgtaagtttatatgtttatatgtatgtatatttattttttgttgtatatatatttatgtttttgtatatatatatagggtttagtttattttgttattgtggttagttaaggatatttttgtttttggaattttttattttttgaggatagggttttaggattgtattggaagtattgttgggagaagtgggttagtatgtgtttttgtttttgggttttatttattaaggttagtttttttagaaatattttggagaaggggtaagagagggttgtttagtaattaggagtttttagtttttgtttttggggtgataggaggttttgagagtatagtagttggggtgggaaggggaggagagaaaggggatgagggtatgtattttgattttttatttattatttttatttaaggtttttttattaggtagttttggtttttggttatgtttagttattttgggaagggtgatgttaggatggtttgtgggggatagaggggtttaaaggaggtattttggggttttaatatgaattttggagagtgggggttgttttttaaggggttaatatttatttgagagtttggtttagagttatgtttgtgaagataaagaatttgaggtattttttagttattagtttgttgaagttattgttgtgggtagggtagagagataggtagggttttaaggggaagtgtagggggttaggtggggattatttaatgattaggggatattagatggagagttgtttttaggatgtattttttttgtttttatttttagttttagtttagtggttttattttttgtttaggtgttgggttatattggtttttttgaagttatttagttggtatagttttttggttaggtgttgtgtagtttttaggtttgttttttgtttattggataaggtgtttgtgttttttagggttagttgttttgtgttgtttagttttgagtttgagttggatattagttggtttaggggtggtttgttgttggggtagaatattagtttaggttggggtagggtttttaggagttatttagattttttttttgtttttaggtttagaagatggagaaggggagggagtggagggatatggggaaagtattttttttttttttagggaaggagattagattttttttattagtttattttattattattatttttttgtggaagttttgttttaaatttaatttatatttgttttgttgttgtgggagttttggttgtttttttaagtttttaggggtttatatttgttattagatatagattatttgtttttattttggttttatatagaatatagttttttgttttttagattatggataaagttggaatagatgggttattatggaggaattgtggagggttagggaaagatttgagggtagtagggatattggtttgaaggtttttttttttttgttttttagggagaggaatttttttttggtgttttttttttgtttatatagaagtaggttttggagttagggggttaagggttggggtgtatatttttattttttttttttttttttttttttattttagttgttttatttgtaaagttatttgttagtttagagatagaggttggaaatttttggttgttaggtaatttggtttttttggttatttttttttgttgttatggtttttatgattgagagggtagttggtagaggggagagtagaaaggttagattgtgaaaggattttttggagttggatgagagatgtttgattaggtaggggtgatatgggagggaggtagtgggagaggttggtggttgtatttttggtgaagtttttaggttgggtgagggtaaggttataagaattttgagtaggttaaagattttgttaagggaagaaagggttttttaggagagtaagaagggtatttttttgggattttttaatgttgaattatgtttttttaagttattggatttgagattaagaggggtgttgtgagggatttttttttatagttaatggtagtagttttttaaataggaaaataggatttgtattttttaattatttttatttaggggttaggaatataaattaatttttatatttaggatttgttttttatagtagttgtttttggagttttgggggttttaagtttgagggataaaaggaattatttatttgttaaggggtgttgtttttagtttaaggttgttttttgagtggtagggattagggggttttttttttggggttagtttggttttggtttttgtttttttttttttttttttttgtgtttaaggattattagtagtagagttggtattagaatttggtttaagaggggtaagtggggtgggagttggtgggttgggttggggtgtagggggttggggaggtagtttaaaggtgaagaaggggttttgggttgggttaggtgaggttaaggtttttagtgaggtgaggttggtataggaggtgtttttggtttggtgtgattttaggatggttttgaatatataattgaaagagttaggtttattagttgaggggtttgttttaggtagaaagggtataggtgatttgagaggtatttggttttttggtttgtaggggtagggagaatttttgattaggggtttagattatagggttggggtaggattttattgaatttttatattgattttgttaaggggattattattttttttttattggttttagtttattaataaaaaagagtttttagggtagggtgttaagttatttagtgttttttggggtatattagttttattagtttttagtattttattttttttttttttgttaattttttttttttttttttttttgtgatttgttttttttttgttattttatttttatttttagtaatattttaggagaagatgaggttttaagtgatattggggtgtgagatggaaaggaatgtttttatattttttatttttttattaggatttaggatttagatttatgtttttgtgtttttgggtttgattgtggtttttggttttttattttgttttttgttttgttagaatttttggtttttttgttttttatatttttagtgttttgttaagttttaggtttttgtttagaattttttgttatatatattgttttgttagttttatatttatttttattttaggttttttgagtttggttttgtttgtgggttagtgtgaaggagtaagttgttttttttttttattttttttttttatttttttatttattgggtttttttagaggttttaaatattttgttgtttatatttttttttttatttgttttattgttgtttttatttttattgttattgttgaggttgggatgagggttagggagtgggttgggttgtggggtaggtgggtaggtagtgtttggtgggtttttagagttgggttgatttttgatggttgagttggtttttttttgtttagttagtattttattgatgttagttttgtggtagtattttaggggtattgtgtttaggtttgttttggagtatttggttgtttgttttatagttattttagagttttgttttgagtttattttaggtggagatgggggggtttgttttgggggtttagtatttgtagtgtgtataggtatttaggttaggaggttatttatgttagttttttgttttaattttgttttaggatttttgtttattgttttatattgataggaagtttttttattgtttagttattattttttttgttatatatttagtttgtttttggtgttagtggagtttattttaaattaagtttttgttaaatggttttgaggagttgggggaagattagtttttttttgttttttttatttatttatttatttattttgagatagggttttattgtgttattgaggttgaagtgtagtggtgtaattataatttattgtagttttgattgtttggatttaagggatttttttatttaatttttttagtagttaggattataggtgtatattattatatttagttaattaaatttttggtagagatttgtttgttgtttaggttggttttggatttttggttttgagtagtttttttgttttggttttttaaaatattggggttattgagttttgttgagttttttttttattttatggaatgttttttaatatttttttgttttttttttttattatttagttttttttaggtgttttgtttagttttattttttagttttttattatagtgtagatggaaagattgaggtttggggagatattggttgatttaagagttaattttaaggattgggggaagtttgaaggagggttttttattgagttttagttgttgtggggaaggttttgttttgttttttttgttttagttttaggttttatttgagttgggggggtttaaggagttatagaagaatttttatttggttttagtgattttttgggtatgagaggagattttttggggggaggattaggtatttttttgagttaatgagggagatataggtatttagagataaagttagatatataaggatataagaatatgggatagaaatagaaattaaaatatgtattgatagagatggaggtttagagatatagagataaatatagagggtaagagagaggtagatttagaatagattaaaggatttagagtgaatagtagataagtttatgtttgataggaggttgagttttgtttttttattgggggtttagggagtttaggggaagttgtatatttggtttaggaatttagtgttagtaggttttttgaagagtgtggttaggtgtttaggggggttttttagtttattggggagagaggagtaaaggttatttgttttaatttggggtggggttggtggtttatgtataaggttttggttgttaggtagggttgagttttttttggtggggagtgggtttgatgtggatgtttttagttgtaatttttggttggagttaggtttaagggttggggtgggtttgggaggagaaattttatttagattttagttttgatttaagttttttggagtaggtagtttatttagtggttttatattggttttttttataaagtggaagatgattatagagttttgggttttgggtgggggttgtttagtgggtgaagagggtgtttagggtgagggagtaatatggggtgagggggggttatgtagaggtgtatagggtgttgttatatgttttagtttttggttttgaggatttggatttgttatttgttgtagtaaggagtttgtgttgttatatatgttggttggggggttttggggtattgggtttttggggagttagtggtgtgggtattgtggtggggagatggtatagttgttttttgagtagaagtgtatggtattttgggttatgttggggttgggggttaggttgggggggtagggatggtgaggttaggtggggagtaagggggttgtatgttttttagataggtttgtaagagaggaaggggagtatggggtgaattgttaaggagttagatggataggatagtagagatagggaagggaaagttggttagggtttttgagtattagggatttagtatattttggtaatatgggattattgattttatgtttggggattatttttatagaggtttgatgagaaaagatttatatatttagtgggtttttggtttttttttttttgtttgaggttttgagtattattttgggaggagagaggaagtaattttaaagttgagtgagtttggagtttttatggtattttggagttatttttagaataggggaagttggtattttattttttggaaaaggggtgttagttagttgttattattatatagttttgtgatttttatagttttttttatggaggttttttatttagggaagggaaatttaggttttttggaaggagagggaagaggaataggtgttatatagggatgttgaagggttgagaggtatagtatggaagtggggagaaaagtttgagtagaggtttttatttttaatatatatatattgagtgggaaagggatattttttttttttttttttttttttgagatggagttttgtttttgttgtttaggttggagtggaatggtgttattttagtttattgtaatttttgttttttaagtttaagtgatttttttgttttagatttttgaatagtttggattataggtgtttagtattatgtttggttaatttttgtatttttagtagagatggagttttattatgttgtttaggttagttttaaatttttgattttaggggatttatttattttggttttttaaagtgttgggattataggtgtgagttattgtatttggttagggatatttttttttttatataggtatagataggtatttatatatatataaatatatatatatatatatatatatatatatgtatatatatatataaggataaatatgttagtatatagttaaatatatttataggtaatattttttggtatatatatagatatatatatatatatattgtttaaagatatatttttatgtatttttatagttataataagtatgtgtgtaatgaaaaggtatatgtttgttttatatatatattattattaaataggaatatataaagaggtatttaaatatatatataagttgttattttttagtgtatatagaggtttaggtgtattagatatttatagagatttattgtttatagttatatatatatatagatgtatatatatagatgtatatatttaagtagggatatatattgtttttttttttttatttattggggttttttgaggggaatttgtatttatattttttttttttttttttttttttaggggtaagatagattttgtttaggagagattataattaggtaaaggggtttttggtggtaatgtaggggaggggtagaggttaggagtagtaattttgttaggtaggttttggaagtttaatggggttttagtgtatatttggtgtagttttaatttaatgttattttagtatttattgttgtttgtttagagttgagattgaggagagatagaggagaggttgggtttagttgagttgtgaaggtagtgtggtttttgtttgttttaggtttgtttgttttttagtttttttttttattttttatgtgttgtttaggtaatgttaattttttttattttttgtttttttttagggtttagagttttggaggttgttagttttttttgttgttaggtttttgttgggtttttttgttaatttaagatttgttttagataaggaggagggtgtatggaatttttggttttattttttagatttttatgtgttttattttatttgtgtttatgttttttttgtttattgttttttgagttatatgtaaggtttggttgtatatgtgtgttttgttttagattttatgtgtgtttttaggaggttgttatatgatttgttatatgttatatgtgtttttgtttttatgagtatgtggttgtgttaagtatatggtatgggtgtagattggatttgttttttaaatttaggagattattaattatggaaaggagatttagggaatattgttttgaatttgttaggggttttgagttttggatttaggagatttaattttgattatttttttaggatgtagtagggggatgttaaattagattttaggaagaatttttttgttgtttgagttaggtgttgttatgtttgtttaggggtaagaggttagatgggatgaattagggattggaagatgtgggggattggtaatttttgtgtttttggttagggtagaagggggttttgttattttaagaaagagttgttggagttattatggtaattattttttttgggagggttagggtgggtagatggtgattttggaaggaagaaggggtttgtttgggtagttagggggtgtgaggatgtgtgaggtgggggtgtgtggggtttattgtggggaggggtggtgtggattttgtgtggtgttgaaggggatagtgttagatttgttgtattgtgtaggtgtagaggtgtgaataaagaggggagggggatgaggtgtgtggttggaggtggtgtgtgtttatgtggttttatttttgtaggggtttgtttttttagttattttttttttaagtaggttgaggaagaagagatagtaagtttttatttaatttgattttttttttgtttttttttgttgttagtttttttttttttgttgttttgtggggtggggaaatgtggaaggaattttgggaaaattagatgtttgggttttttatttttgtttggtttgattttggataaggggttttttttttagggttttggtttttttatttttaaaatggattgatagtatagatttgtttattttttagaggtgtttgaagttttgatgagataatagatgagaagtggtttttgttgtgatgagttagttgaagtggttgtattggagtgttagattgttagtggtgtagtggtttttgtgttttttatatttttttatatttattttgtggatgatgggggaaggtattatttttggggttttttgaagtggattttgggattgggatttggggatgtggtgagaggtagttttgaagttgagtttagaggtttggggtgttattgttttagggtggatttagttttagattttataattaaatttaaggttagttgagaagtattattattggtgggttgagttgagtttttattttttttaggattttggatttttggaggaaatgaaagggatttagttggaaatatagtttttttttgtgttttttatattttttttttttggtggaaatgtggtttaaattgttatgaagtggaagaggttggatagttttttataattaattaggaatgggaggtttgagtaggtttatttgatgagggaaatattatagttttgttaatttatttattattttaataattatttattgaatatttgttatgtggtagatagtaagagtttggatagtttttttttgttttttaaagttgttaaatgtgattagagggtagaggagaggttggtaatttaagagttttggttttgttttttttgtgtttggttttgtttgttttttttattattattttgtttagaggtggttattggtttaagaggatgatagaagttagtttttgatgtttattgtattttttagttttaggttttaagttttgtagttgagaaggtgaggtttaatgttatattattggtttgttttgtttttgttttggggtttatttgaaaagtttttagattggatttttggtgagatggtatttgattaaataggtttgtttttataggttaaggaggtgggtttggtgtggttattttaaggttaaagtgagaaaattttattgtgtatgtgtaatagatagttgatggagttattgatggagttgtttggaggggagtaagagtttggagttgttaggtattgagtattggaggggttgagagggaagaggaatttgagggaggggagttgagttggggttgggtttgggggttgtttttgggagttggggtgtaggaatataatggaggtggatttgtaggtaatagtggttttgggatgttagtgttaatgtttttttatttgtaggtttttggatttgttttgggaagatgtgttgtttttatatgttttgaattgggttttgttgtgttagttgttttggttgtagtgtgttagttgggttttttggttgttggtgtagttttatttggttgggttgtgttgttttgatgttgtgtaggtgagttgggggttgaagttttgtttttgtttgggtattgttttgtttttagtttagtttttagttttgtagtatgtttttttggatttttttgggttgttggggttgtttggaagggatttatgtattaaagggtaaatatttggtagtgatttagagggaaagtggggttttttttgggagagtaggaggttgttagaaaagaatttaggttaggggtgtataggtggttgaggagtgtgggatgggttgagagttggggtgtttttttgtttgtaggtgggtttgtagattttgtgggttgtattggtttggttgttgtgggatgttgaggggttgtaggagttggtattggtgttgtgttatgaatggttgttagatgaggatttggtgttggtgttggtgtggaatttgtagttgtggagtgtggtgttgggtggttgtgggtaattgagttgttgggtgtttggggttttggttgagggttgtttatgtttgtagtgtttgttgtttgtgtattgtgattgggtggatgggttggtgttgtgtggttttgttgattgttgtttggttttggaggagttggattttattgtttgttgttagtttaaggatgaggttattgtgtatttggtgtagaggtgtggtgttggtttttgtagtttttttttggttgttaatgttaatgtgggggatgttgtggtttaagagttggtttggaattgtttagaattttattattttgattttattggttgtttttgtgttggaagtgatggtgttaggtgtttgggtttgatagggtgggaggagggtagttatttagtttttgttggtatggggtgggttgtagttgttaaaaggttggattgagggttttgaatttttttgtaaattatagtatttttattttgaatagaaagggtttttaggattgtttaggttagagagtttatagtttaaaaattttttttaattaatgtttatatattgggagattttatatagaaagttgatttttggtttttttttaataagggggagattttgtaattttaggtggagttgagggttaggttttttttttaaatgagataggaagtttttagtttattggaagttaatttaggtgttttttttgtgtagggatggaaaaagtatgtttttgttttgagttggagggagattgggattttgttggagttagtttgaggttgagtgagtttgggtttttattttattttattaaaggtgtggtggttttatgtttttagttttattttgttttttttttaggatattggttgagtattgttttgtgttgtgtttgttgtgggtgtggtattgttattatgtggtggagtttagtttgagttgtttgtggaagtgtggtgtggatattgatgtggagttgttgttgtattaggttttggtgttgttgtaggatatggtgggttttgtattttttgttaatttgtaggtttgatttgtttgttaattggagt

SEQ ID NO: 254 - DNA, 13705 bp, Artificial Sequence
  chemically treated genomic DNA (Homo sapiens)
gttttgattggtaggtgggttagatttgtaggttgataaaaggtgtgaagtttgttatattttgtagtagtattagggtttggtgtagtggtggttttatgttgatgtttatgttgtgtttttgtaagtggtttaggttggattttgttatatggtggtagtgttgtatttgtagtgaatgtagtatggggtagtatttggttaatgttttgagggaggagtagggtgaggttagggatatgaggttattatatttttggtggggtaaggtggaggtttgggtttatttagttttggattggttttggtaaaattttggtttttttttagtttggggtaggggtatattttttttgtttttatataagggaggtgtttggattggtttttagtgagttggagattttttgttttatttaaggggggaatttggtttttagttttgtttaggattgtaagattttttttttgttgaagaaaagttagaagttgattttttatgtgaaattttttaatgtgtaaatattggttgaaaaaagtttttaaattatgggttttttggtttaggtaattttagaggttttttttgtttagaatgggggtgttgtggtttgtaggaagatttagaatttttagtttggttttttaataattatagtttgttttatattagtagaggttaagtgattgttttttttttgttttattaggtttaggtatttgatattgttgtttttgatgtggaggtagttggtgaggttaaggtggtggagttttgggtagttttgagttaatttttgaattgtggtgttttttatgttggtgttgatggttagagagaggttgtggagattagtgttgtgtttttgtgttaggtatatgatggttttgtttttgagttggtggtaggtggtgagatttagtttttttagggttgggtagtgattagtgaggttgtgtagtgttagtttgtttatttagttatagtgtgtgagtgataggtgttgtaggtgtgggtagtttttggttaaagttttaagtgtttggtgatttagttgtttgtagttgtttaatgttatattttgtagttgtggattttgtgttagtattggtattaggtttttgtttgatagttatttgtgatatggtgttagtgttagtttttgtagttttttggtattttgtagtagttgggttaatgtggtttgtgggatttgtggatttatttgtgggtggggaggtattttaatttttagtttgttttgtattttttagttgtttatgtatttttgatttgagtttttttttggtagttttttgtttttttaggagagattttattttttttttgagttgttattgagtatttgttttttggtgtgtggattttttttgggtagttttggtggtttaagggggtttagaagggtatattgtggggttgggggttgggttagaggtggggtggtatttaggtaggggtggggttttagtttttggtttatttgtgtggtattgaagtgatgtagtttggttaggtgaagttgtattagtgattggaaggtttggttaatgtgttgtagttggagtagttggtgtagtgggatttggtttaggatgtgtgggagtagtatgtttttttagggtaggtttaggaatttgtgagtaaaggggtgttggtattggtgttttggggttattattatttgtgagtttgtttttgttatgtttttgtgttttagtttttaagagtggtttttagatttagttttggtttggttttttttttttaggtttttttttttttttggtttttttggtgtttggtatttgatggttttgggtttttgtttttttttggatggttttattggtggttttattggttgtttattgtgtgtgtgtagtaagatttttttgttttggttttggagtggttgtattaaatttgtttttttggtttgtagagatagatttatttaattgagtgttgttttattgaggatttgatttgaaagttttttgggtggattttgaaatggaggtggaatagattggtggtgtaatattaggttttgtttttttggttatagggtttgaggtttgaagttggagaatgtggtgggtattagagattggtttttgttgtttttttgagttagtagttgtttttgagtgaagtggtggtgggaggagtaggtaaggttaaatgtggagggggtggagttaggatttttaggttattggttttttttttgttttttggttgtgtttagtgattttgaaaaatggggagaaattatttaggtttttattgtttgttatgtagtaggtgtttaataagtaattgttgaaataatgaatgaattggtgaggttataatgttttttttattaagtaaatttgtttaaattttttatttttgattaattatgaagagttatttagttttttttattttgtaatagtttgggttgtgtttttgttgggggagagagatgtagggggtgtgaagaaagattatatttttaattgggttttttttattttttttaaaggtttagagttttaagaagaatgagagtttagtttagtttgttagtggtagtgttttttggttggttttgggtttagttgtagggtttggggttgggtttgttttgggataatgatgttttagatttttggatttagttttagggttgttttttattgtgtttttaggttttagttttaggatttgttttggggaattttaggagtagtgtttttttttattatttatgggatgggtgtggggggatgtgaaggatgtgagagttattgtattgttgatggtttggtgttttggtgtaattgttttagttggtttattataatgaaaattattttttatttgttattttgttaaggttttgggtatttttgaaaggtgggtaggtttatgttattagtttattttaaagatggggaaattgaggttttggagaggaagttttttgtttagaattaagttagatgggaatagagaatttagatatttggtttttttagaattttttttatgtttttttattttgtaaggtagtgagaagggagaagttagtagtggggagagataagaaaggggttaagttaggtgagggtttgttatttttttttttttagtttgtttagggagggggtagttgggaggatagatttttgtaaagatagagttatgtgagtgtgtattatttttggttgtgtgttttgttttttttttttttttgtttgtgtttttgtgtttgtgtagtgtgataaatttggtgttgttttttttagtattatgtggagtttgtgttgtttttttttgtggtgagttttgtgtgtttttgttttgtatgtttttgtgttttttgattgtttgaatagatttttttttttttttgaggttattatttgtttgttttggtttttttaaagagagtagttgttatagtaattttagtggtttttttttaaaatagtagggtttttttttattttggttaagggtataagggttgttggttttttatgttttttggtttttagtttattttgtttaattttttatttttgggtaggtgtgatgatatttaatttaggtagtaaggaagttttttttgaagtttgatttaatatttttttgttgtattttgggagggtggttagggttggattttttgggtttgagatttaaaatttttggtgggtttaagatggtgttttttagattttttttttatagttgatggttttttggatttagggggtgggtttagtttatatttatattgtgtgtttggtgtggttgtgtgtttgtgggggtgggagtgtgtgtggtatgtaataggttatgtggtagttttttagggatatgtgtggggtttggagtgggatatgtgtgtgtagttgggttttatgtgtggtttaaggggtggtgggtgagagagatgtggatataagtggggtggggtatgtgagggtttggggaatagaattaggggttttatgtgtttttttttttgtttggggtgggttttaggttggtgggagagtttagtggggatttagtgataaggggggttggtagtttttggggttttgggttttgggagagggtggggggtgggggggattagtgttgtttgagtggtgtgtagggggtagggggagggattgagaggtgggtgggtttggagtaaatgggagttgtgttgtttttatagtttagttgggtttagttttttttttgtttttttttggttttagttttgggtgagtagtggtgagtattgaggtggtattgagttggggttgtattgggtatgtgttgggattttgttgagtttttggaatttgtttggtagggttgttatttttgatttttgttttttttttgtattgttattagaggtttttttatttggttatggttttttttgggtgggatttgttttatttttggggagagagggagaggagaggaatatgggtgtagattttttttaagagattttagtaggtgggggggaggggatggtgtgtgtttttgtttgagtgtgtatatttgtatgtgtatatttgtatgtgtatgtgattgtgagtagtaggtttttgtgagtgtttgatatatttggatttttgtgtgtattggagaatgatagtttgtgtatatatttgggtatttttttgtgtgtttttgtttgatgatggtgtgtgtgtaaaataagtatgtgtttttttattatatatatatttgttatgattgtgagagtgtatgagggtgtgtttttgagtagtgtgtgtgtgtgtgtgtttgtgtgtgtgttagagggtgttgtttatgaatgtgtttaattgtgtattgatatatttgtttttatgtatgtgtgtgtgtgtgtgtgtgtgtgtgtgtgtgtgtgtgtttgtgtgtgtgtaggtgtttgtttgtatttgtatgaagaaaagaatgtttttggttgggtgtggtggtttatgtttgtaattttaatattttgggaggttaaagtgggtggattttttgaggttaggagtttgaaattagtttggataatatggtgaaattttatttttattaaaaatataaaaattagttaggtatagtgttgagtgtttgtaatttaagttatttaggagtttgaggtaggagaattatttgaatttgggaggtggaggttgtagtgagttgagatagtgttattttattttagtttgggtagtaggggtgaaattttattttaaaaaaaaaaaaaaaaaagaagaatgttttttttttatttagtatgtatatattgggggtaggagtttttgtttaggtttttttttttatttttatgttgtgttttttagttttttagtatttttatataatatttgttttttttttttttttttttaggaggtttgagttttttttttttgagtgaggggtttttataagagagattataggggttatagggttgtatgatggtgatagttggttgatattttttttttagagggtggggtattaattttttttattttagaagtagttttaaagtgttataagaattttgggtttatttaattttgaagttgttttttttttttttttagggtgatgtttagggttttaggtagaaggaaaggagttaggggtttattgggtgtataagtttttttttgttaggtttttatggaagtagtttttaggtgtgggattaatgattttatattattagggtgtgttaggtttttgatatttagaggttttagttaatttttttttttttatttttgttgttttatttatttaattttttggtagtttattttatgttttttttttttttttataggtttgtttgaagagtatgtagtttttttattttttgtttggttttgttatttttgtttttttagtttgatttttggttttagtatggtttagggtgttatgtgtttttgtttggaaggtgattgtgttatttttttattatgatgtttatgttgttggttttttgaaggtttggtgttttagagttttttagttagtatgtatggtagtataggttttttgttatggtgagtggtaggtttaggtttttgaggttgggaattgggatgtgtgatagtattttgtatatttttgtgtggtttttttttattttgtgttgtttttttattttgggtattttttttatttattgggtagtttttatttggggtttagagttttgtggttattttttgttttgtggagaaggttagtgtgaggttattgaatgggttatttgttttagggggtttgagttggagttgggatttgggtggggtttttttttttaggtttattttagtttttgggtttggttttaattggaagttatggttggaagtatttatattagatttattttttgttagaggaggtttggttttatttggtagttggaattttgtatatgggttgttagttttattttaggttggagtagatggtttttatttttttttttttaatgggttggggggtttttttgagtgtttggttatattttttggaggatttgttgatattggatttttgaattaggtatgtaattttttttgggttttttgggtttttagtgaaggggtaaggtttagttttttgttagatatgggtttgtttgttgtttattttgaattttttaatttgttttaaatttgttttttttttgttttttgtgtttgtttttgtgtttttgaatttttatttttgttgatgtatgttttaatttttgtttttgttttatatttttgtgtttttgtatgtttggttttatttttgggtgtttgtgttttttttgttggtttagggggatatttggttttttttttgggaagtttttttttatgtttagagaattgttagagttaaatgggaatttttttatggttttttggatttttttagtttaggtaaggtttgggattgaggtagggagaatagggtagggttttttttatagtagttgaggtttagtagggagtttttttttaaattttttttaatttttggaattggtttttgagttagttaatgtttttttaggttttaatttttttatttgtgttatgatgggaggttggaggataggattgggtagggtatttggaggaagttgagtaatggagggaggggatagaaggatattgaggggtattttatggagtagaaaagaggtttagtagggtttagtggttttagtattttgggaggttaaggtaggaggattgtttaaagttaggagtttaagattagtttggataataagtaagtttttattaaaaatttaattagttggatgtagtggtgtgtatttatagttttagttattggggaggttgggtgggaggattttttgagtttaggtagttaaggttgtagtgagttatgattgtattattgtattttagttttagtgatatagtgagattttgttttaaaataaataaataaataaataaaaaagatagaaaaaggttggtttttttttagttttttaaagttatttgataagaatttgatttaaaatgagttttattggtattaggaataagttaagtatgtagtaggaggaatggtggttagatagtgaaagaattttttgttaatatgaggtagtgggtagagattttagagtagaattaggatagggagttgatgtggataattttttgatttggatgtttatgtatattataggtgttaagtttttagagtaggtttttttatttttatttggggtgggtttaaggtagggttttggggtggttgtggggtgagtagttaagtattttgagatagatttggatatggtgtttttgaggtgttattgtgagattgatattgatgaggtgttggttgagtgggaggaggttgatttggttattgaaagttagtttagttttgagggtttattaggtattgtttatttatttgttttatggtttggtttattttttggtttttattttagttttggtagtggtaatgaggatgaggatgatgatgaggtaggtggggaagaagatgtggatgatgaggtgtttgaggtttttgaaggggtttggtgagtggggaagtgggagggggaagtgggagagggaagtggtttgtttttttgtattggtttataggtagagttgggtttaaagggtttgggatagagatgggtgtggggttggtggggtagtgtgtatagtaggagattttagatagaggtttgaggtttggtagaatattggggatgtggggagtaaagaggttaggggttttagtagaatagggggtagggtgagaggttagaggttatagttaagtttaggaatataggagtatgagtttggattttggattttggtgggagagtggggagtgtggggatatttttttttgttttatattttagtgttgtttggagttttatttttttttaagatgttgttagaaatagaaatgggatggtagaagggaagtggattatggaaaaggaggagaaagggagattagtagggagggaggggatggggtgttggggattggtagggttggtgtgttttagggggtattgaatagtttggtgttttattttagaggtttttttttgttagtgggttggagttagtgaaaaggggatgataatttttttagtagagttagtgtgagagtttagtgaaattttgttttagttttgtgatttgggtttttaattagagattttttttgtttttgtaggttagggagttggatgttttttaagttatttgtgttttttttatttgggatgagttttttggttgatgggtttgatttttttagttgtgtgtttgaagttattttggagttatattgggttaaaggtattttttatattagttttgttttgttggaggttttggttttatttggtttaatttagagttttttttttatttttgagttgtttttttaattttttgtattttggtttgatttattagtttttgttttatttgttttttttgaattggattttggtattagttttgttgttgatggtttttggatatagagaggggaggaggaggaggtagaggttagagttaagttggttttagggagggagttttttagtttttgttatttagaggatagttttgggttgggggtagtattttttggtaggtaagtaattttttttgttttttagatttgaggtttttagggttttagaaatagttgttgtaagggatagattttgagtgtgaggattggtttatatttttgatttttgagtaggggtggttaagggatgtagattttgtttttttatttggaggattattgttattagttgtgagggagagttttttatagtattttttttggttttaagtttagtggtttgagaaagtatgatttagtattgaaggattttaggagaatattttttttgtttttttggagggttttttttttttttggtagagtttttagtttgtttagaatttttgtgattttatttttatttagtttgaaggttttattaaagatgtagttattagttttttttattgttttttttttatgttatttttgtttaattaggtattttttgtttagttttaggaagtttttttatagtttaatttttttgtttttttttttgttagttatttttttagttatggaagttatggtaataggagggggtggttagggagattgggttgtttagtaattaggagtttttggtttttgtttttgggttgataggtggttttgtgagtagagtagttggggtgggaaggggaggaaagaaagggaatgagggtatgtattttgatttttaattttttaattttagagtttgtttttgtgtgggtagagggggagtattaaggagaggtttttttttttaaaaagtaggagggggaaagtttttggattagtatttttgttgtttttaaatttttttttggttttttatagtttttttgtggtagtttatttattttagttttgtttatagtttaagagataaaggattatgttttgtgtagggttagggtgggaatagataatttatgtttaatagtaaatgtaggtttttgggagtttgaggaagtagttagaatttttatagtagtaagatggatgtgggttagatttgaggtaggatttttatagagaggtggtaatgatggagtaggttgatggagagaatttaatttttttttttggaaaaaagaagaatgttttttttatgtttttttattttttttttttttttattttttgggtttggaggtagaaggagggtttggatggtttttaaggattttgttttagtttgagttggtgttttattttggtagtgaattatttttgagttagttggtgtttgatttagatttagagttggatagtatagagtggttggttttgggaagtatagatattttgtttaatgggtagaaagtggatttggaggttgtgtagtgtttggttaagaggttgtattgattagatggttttaggaaggttgatgtggtttggtatttgggtaagaagtaaagttattaggttgggattgaggatgggggtagagggaatgtattttgaaggtagttttttatttaatgttttttggttattgggtaatttttatttgattttttgtatttttttttgagattttatttgtttttttgttttgtttatagtaatgattttagtaaattggtggttggggagtattttaagttttttgtttttatgggtatgattttggattaagtttttaggtgggtgttgattttttggaggatagtttttattttttggggtttgtgttagggttttaggatgttttttttgagtttttttgttttttataagttgttttgatattattttttttaagatggttgggtatggttaagggttagagttgtttggtaaagggattttgggtaggggtgatgggtggagggttagggtgtatatttttattttttttttttttttttttttttattttagttgttgtatttttaaagttttttgttattttagagatagaggttggaaatttttggttgttaggtaatttttttttgttttttttttagggtgtttttgaaggagttggttttaatgggtgagatttaggaatgagagtgtgtgttggtttattttttttagtgatatttttagtgtaattttgaagttttgtttttagagggtgaggagttttgagagtaggggtgtttttagttggttatagtggtaaaatgggttgggttttgtgtgtgtgtataggagtatgagtgtgtgtatagtagggaatggatgtatatgtgtgtaggtatgtgaatttgtatgtgtgtagatagtgttgttatggttgtatgtatgtggaattatatatgtgggtaggtatattgttagggttgagtgtgttgtgaagaggtaggagtttgtatgtttgtgtaggttagtgtttggttggagaggggattttgtttggttgtattggtttataggattgtgttgtggtttatttttttgtggtttaggtttagaggtaagggaatgttggggtaattagtatgttggggtaattagtttttagtatttgagggagttagggatgggtttttgttgatggatttgttggaagaggagttttttgtggggagggtttattagtggggtttaggaggtaggaagttgttggttaaagggggtggggatgaaatgggaggttggggaagatggttgtgggaagggtttttgggaggtagttaaggttgaaagttagtttttttttagatggtgtttatatgttgatttgtgtgtttatgttgtttaatatggatttttatggttatgtgagtggaggtgggtgggtaggagttggaaaataaatttttggttagatatgtaggatttgggaggttaagggttttttaaatttataggtttttgtttttttttttagaatattgggaagtgtatgatttgtggggattttattgggaatttggagggttttaatgatggtggtgatttttttagggagttgtttaaggtggggggtggggtagggtagaagttgttggaggggaaggatggaggatttagttggtgatggagtttagagttggagggagggtagggttggggtttgttgatttttggtttttgttatggaagtttgggtttttgtgatttagtttggggattgttttttttttaggttttatgtgtaggtttttttggaatatgtgtatatgtgtgtggttgtgattgtgtatggtgggggaggggatttggttttggaaaatgtgagtaggtggttttggtttttgtgtttgtttttagttttttttttttagtgtgtgttggggtggaaggtgggagttgtgggggtttttgtatgggatagggattggatgggggtatattttatattgtttttttgttgtgtggatagttaaaaagatttttttggtgttgttgtgttgtaggaatttggagggagaggggtttgagagggattaagtttttttaaggtttggtagtgagttagtgtaaagttggagttagaaattgttttttggttttttgtgagtaggttttgtttttaggtgttagttttatggtttgtaattgagggtttagatatgtaggggttggtgttggtaggagaagggagtggtttatttagtgggtttatttttttttttgatttggtggtagtttatttagagaggtttggatttatttgaagaaatttttaggttaggataaaggtgtttttgttttattatatatatgtaatagtataggattgttttagggtgtttttgtgagtttggggtgttgggtttttgagtttggggtatatttgagagggaatgtttatggtgagttggggtgttgtttgagttgagttgtatttgtgtgtttgggtgttgtgaattaagggtttgtatggtttggtgtgtttgtgttttagggtttatgatttagagtgtgtgtttgagttggggtgtaggttggatgtttatgtgtggtggggtttatatttttgaattggttgtgtttgaggtatgttatatgtttttgagtagggggtgtatttttgtgagttaaagattttaagttttgaagtgtttatttgaatgggtagtgtttgtgagttggggtgattgtgaattggtgtgtttggtttgttggggtgtatgttagaattgaggtgtgttatgtgattttagatttatatatgggtggggtatttgtgggtgagttggatgaggttagggttgttttttttttgtttttgtttttttttgaggttttttttggtttagtggaaaagggttgtagggaagtggtttgatttttttttttttattattttaatttagattagttagaagggagttttagattttgttgggtttgtttagtgttatagttttaggtttagtggtgtttttagtttttttggagttgttatttatgttggtttttttaggtttttttttgtggttgtgtggggagggttttttttgtgattgggtgtttttattttatgtggtttttgtttttagtttttgtttttttttttttgtt

SEQ ID NO: 255 - DNA, 3574 bp, Artificial Sequence
  chemically treated genomic DNA (Homo sapiens)
tatattgttttttttggtgagttattttattttaagtatttttttttattatatgattttgttttatttttttattgtattaagaatatttgaaatgtatatgtttatatttatatagtttatttttttttgagaatggaagttttatagaaggtgaaataaattttgttagttgttgttagttgtatagtaagttttttgtagaaaatgtttattggttatatttttttaaaaagtgaataaattttaagattaagattttaaattaaattattttagtttttaattgtttatagtgatatattgagaaattgagtgatttttaagagaaaggttattttgaggttggggttgaattaaaatttagggggtttatattaggttagtattttggaattggttgttttgtaagattttgggagtattaaattggtatgagatatttgataatgaggttagttatgtattgagtttaggttttatttttgttgtttttttgatgttagaaaaagtatgagttgttgtatagttttttttattaaggtgataaattatatttttgttgggttttgtattttgtaaattataaatttatttttttttttttttttatattgaaaaatgtaaaaatttattgtagagaggttaaaattttttttaaatgtaaataaatattgttttttagtagaggtgtttttttttatttttgttatatatattattgtggatttgtttgagaaagtatgtgattttggtggtagttaggtttttaatagagaatgagggtttgtataaattttgggtttgtgttgtagagtaagataaaggattttgaattgtagtattattttttttagtttaaggtagtttgtgaaaggtattgggagtggtgtgatgtgggtattgtgaaattttttttgttgttatatgtatttgtgttttttttaattatagtttagtataaattttaggtgggtgatttggtaggtaaatggtgtttaggtagttgggtaatttattgggttttagtgggtgttggggagttttatgtgttaggaggtggataatttagggggtaaggggtttgtataagggtgaagatgtgttttttttttggtattgatttatgtgtttaaaggtttttgtggtaatgtttagggatgtgaattaggtgttgggggttggggaggaggtgggattggaagtgagagtagtttgtgtttaagattgtgtaagaggtggttttttgtttgttggttttagtatattttggtttttgaaaaaatattatttttgttttttgttattttttgtattttagaaaattttttttagggtaggaaaggatagtgagttattgtaagtattttttagtaatttttttttgtgtttttttatttttttgtgttatagaggggtagagtattaggaaggatggtaaatatgttttggtttagtggtggtttgtggttgttatttagttggttgtatgtagtattttttggatattatatgattttttttgggttttgtggatataggaaatttttattaaaggttggggatttaaatatttttagaatatggttgtgtttttgggttagttgtgttttttttttagatgtgtgtggtttttggtttttgtaaaaatggaattagatttggtattatattttgttatagttataggaaaatatattaaagttataggaaaataaattaaaaagtaagttatagtttatgtaaaggtgaatttgggggttttggtgtttttttttgttgttgtgtgtgtttgggaagtataggagatttggatttttttttttttaaaagtaatatttgaaagtattgggtatagttgagttttttttgtttttatgtttgtagagatgatttttatgttatttttttttttgatatttaaatttttttttgttgtttgtttagttttttttgggaatggataattattttatttttggaaataaagggaaaggtggtaaaaggtgatgtggaggtgtttgtttttttggggtttttatttttggtagtttgatgttttttgtgttaaggtttggttgtggaggttgggaaaatgtggtttttgttagtaagggttgggtagggagtttggtgtggtttggtggattttggaggaaggtgaagggtggaggtttttggtgattttttggtggagtggtgtggttgttttagtttgtgtttgtttggttttttttttttttgggttgattgtattagaatttttttttattattaatttttatttatattttgtttgttggttttgtatttatattgatatgtattggtgttgagggttatgaattggagttatttttttattgggggatgtgtggtttttttgtaattatggtttgtgatggtttaatgtggataggttatttttttttgttttgtgtgtggttttttttttttttgtgtgtttgttttttaattaaagttgtgtgttagtgagttgtgttggttatatggtgttattgttggtggttgtattttgttgttttttttttgtagttttttgatgatgtagtgattgtggttggtggagattgagtaatggggaaagggtgagggaggggttgtggggtgtgtgtgtgtttggtgtattgaagttggtattgggagtagaggttgtgtgttgttttggtatttgttttttttttttttggggtttggtggtgtgtttggaatttagttgtggttgtagttggagaatgagagtttttagggatgggggtggggtggttaaaggggtattggtggaggataggagggttgtgtgttttgttggggtttgtattttgggtatgttagagttttgttggggttgaaggagtgagggagttgtattgtgggaagggtgtagtatgaggatggttgtgggagtggtaggtttgagtgtagtttggagagttgtgggtagtgtttgggattatgggtagtgttggagtggagggttggttttgggtatagtttgtagatggtttgggttggtgggaaggggattgaagtggtaggggtggtggggagtttgggtatttttaaaaattttttgtttttaatttgaagtgggaggtatttttttttttttggatttagtatttgtagatttggttagttttttttgagatttgttttgtggagttttgttttggggattgggtgtgaggtgaattagaaggatttgttgagtattgagaaagtattggtttaggtgtaaagagttgggggttagtttttggagggtttggagattttatgtggttttgattgaaggatttggtgtgtttaggttaatggagttggggtgttttaagtttgggggatgagggagtggtatggaggggagtaggggtaattgggtttggttttttttttttttgtttattttttgttttagatatagtttttttttattggttgggtatttgtttgtagaggagttgtgttttaaaatggtgataggaaattttatttgtgttttagttaattagattgttatagtgtgaatttgtagggtggaaatgtgagt

SEQ ID NO: 256 - DNA, 3574 bp, Artificial Sequence
  chemically treated genomic DNA (Homo sapiens)
gtttgtgtttttattttgtaaatttgtgttatgatagtttaattggttgaggtgtaggtgggattttttgttgttattttaagatataatttttttgtaagtaagtgtttagttagtgaaagggggttgtgtttgaaataaagagtaagtgggaaaaaagggaattaggtttagttgtttttgtttttttttatgttgtttttttgttttttggatttggagtgttttagttttgttaatttggatgtattaggttttttggttgggattatgtggggtttttaggttttttaagagttggtttttggttttttgtgtttaggttggtgtttttttggtgtttagtaaatttttttggtttattttatatttagtttttaaagtagagttttatagggtagattttaggaagggttgattaggtttgtgggtgttggatttggaagaggggaggtgttttttgttttaggttagggataaagggtttttaaaggtgtttgagttttttgttgtttttgttattttggttttttttttgttaatttgggttatttgtaggttgtgtttagggttagttttttgttttaatgttgtttgtagttttaggtgttgtttgtggttttttgggttgtgtttggatttgttatttttgtggttatttttatgttgtgttttttttataatgtaatttttttgtttttttggttttggtggggttttggtgtatttaaaatgtaggttttagtggaatgtatagtttttttgttttttgttggtgtttttttagttgttttatttttatttttaagggtttttattttttagttgtagttgtagttgggttttgaatatgttgttgggttttgggagggagaggggtaggtgttagggtggtgtgtagtttttgtttttggtgttagttttagtgtgttgggtatatgtgtgttttgtaattttttttttattttttttttgttgtttaatttttgttagttgtggttgttgtattgttagagagttgtaagagggaggtagtaaggtgtggttgttagtagtgatattatgtgattggtatggtttattgatatgtagttttggttaaagagtgggtgtataggaggggaggagattgtgtgtgggatggggaggaatggtttgtttgtgttaaattattataagttatggttgtggaagggttatgtgttttttagtaggagaatgattttgatttgtgatttttagtgttggtgtatgttgatgtaagtgtgaggttggtgagtagagtgtgagtgggggttggtggtgaggggagattttgatgtaattggtttggaaaggaggagagttaggtgagtgtggattggggtggttatgttattttgttagaaggttgttaggagtttttgttttttatttttttttgaaatttgttaggttatgttaagttttttgtttaatttttattgatgggggttatatttttttggtttttgtagttagattttgatataaaggatattaaattgttgagggtaaaaattttggaagggtggatatttttatattgttttttgttatttttttttttatttttggaggtaaggtgattatttgtttttggggagggttgggtgagtggtaaggggagatttagatgttggaggaggaggtaatgtagaaattatttttgtgggtgtgaaagtagagagagtttggttgtgtttgatgtttttggatgttgtttttaggagaggaaaagtttaggttttttgtgttttttgaatgtatgtggtagtgggaggaagtgttagggtttttgagtttatttttgtgtgggttgtggtttattttttggtttgtttttttgtgattttggtgtgtttttttgtggttgtggtagagtgtggtattagatttggttttatttttatgagagttaggaattatgtatgtttggagggagagtgtagttgatttgagggtgtgattgtgttttgggagtgtttgaatttttggtttttggtgaaaattttttgtgtttgtaaggtttagaggagattgtgtgatgtttggggggtgttgtgtgtggttggttgggtagtggttgtggattattattaaattggggtatgtttgttgttttttttggtgttttgtttttttgtaatgtggggaagtaggagggtgtggggagaaattattaaaggatgtttgtagtgatttattgtttttttttgttttgaagaggattttttaaaatgtagagggtggtaggggatagaggtagtgtttttttgagagttgggatgtgttggagttagtgaataaaaggttattttttgtgtggttttgggtgtagattgtttttgtttttagttttattttttttttaatttttggtatttagtttgtgtttttaaatgttgttgtagaggtttttaaatgtgtgggttggtgttgggaggagagtgtatttttgtttttgtgtgagttttttgttttttaaattatttattttttggtgtatggggttttttagtatttattgggatttagtaggttatttggttgtttgggtattgtttgtttgttaaattgtttgtttgaggtttgtgttgaattgtagttagagaaggtataagtgtatatggtagtaaaaggaattttgtggtatttgtgttatgttgtttttagtgttttttataggttgttttgggttggggaaggtggtgttataatttagagttttttgttttgttttgtggtgtggatttggggtttgtataaatttttgttttttgttagaaatttaattgttgttaggattatgtatttttttggatgaatttgtggtgatgtgtgtagtaaaagtgaaaaaagatgtttttgttagaaaatggtatttatttgtgtttggaaggggttttgatttttttgtagtgggtttttatattttttaatataagggggaggaggaaaataaatttatggtttgtagaatgtagggtttagtgagggtgtaatttgttattttgataaaagaaattgtgtagtaatttgtgttttttttgatgttagaaggataatggaaataaaatttgagtttggtgtatggttggttttgttgttaaatgttttatgttaatttggtatttttgaaattttgtaaaatagttaattttggggtattgatttggtgtggattttttggattttggtttgattttagttttaaaatggttttttttttgagagttatttgattttttagtatgttgttgtaagtaattggaaattggaatagtttggtttgaggttttaattttgaggtttatttgttttttaaaaaaatgtggttaataaatattttttatagagggtttattgtgtgattggtagtaattaataagatttgttttattttttatgaagtttttgtttttagggggaaatagattatataaatgtaggtatatatattttaggtatttttagtgtaatgaagaaataaaataggattatgtgatgggggaggatgtttgaaatagagtgatttattgggaggggtggtgtg

SEQ ID NO: 257 - DNA, 3506 bp, Artificial Sequence
  chemically treated genomic DNA (Homo sapiens)
tagtggtaaagttttgtttatgttaagtaataaaggataagttagtttttgttgtgattattttgttgtattgataagttatgtatttttatttaaggatttaaatttttattttttttaagaattgggttaaaattgataaattaaatttatttatggtttattgattaaaggttgttgtataataagtttttgttatgtttagtagttggatttatagtgttagaaatttataattgtttgatttttttttttattatattgtgaaaattgttttttaaatgtaattaattttaaaattttaatagtattgtggttaggtgtggtggtttattattgtaatattaatattaggtataggtgaggggattgaggttaggatattgaaattagtttgggaaatatatggagatttggtttttggaaaaataattagttttgtgtggtggtgggtgtgaggttttggttaattgggaggttatagtgagttatgatgatattgtattatagtttgtgtgatggtttatgttagtaagttttggagtatttgaaataagttgtgttgggtattttatttattggagagtgattagtgattgatgtttatttatagtgattagagatgtatgttttgatagtagtataaatttagtaggtgtgaataaatggtaaagagaaattgggtaaataagtattatggttttttagttgagaaagtgggggttttaaaaagggttttttgttgatagaaagggatgtttaattattgaaattgtagagggtgtggttttggtgtttgagtgtgtagattatatttatggtggtgattgttttgtgtttggtgtgttttgtataggttatggtgttttggattatgttttttaggaatatttttagtattttgtgagtttttttgtagatgaggttggagatgtgttttatgttgttgtggtgagtaaggtgttggatggttggtttggtgatgttttggatattgttgtgtagtattttatggtggtgtttagtgttgtttttgttaagattttttttgtttttgttgtggttagatatgatgagtaagaggagttttatttaatgttttgtgaggattttggtttgaggtagtgtttttatatgatagttggtggattgaattgagaatttgaaagaagttggtgggaagttttgttttggtgggggaggggaaatttaaagggttaaattgaaatagggggaaaaaaaaagtgagttttttgtttttgtgttttgaattttgtaatgtgtatagtattttgttattatgttatgaggttttaaaaaattgtttttgaatgtagaagatatatattaatattgtgggaaatataagaaaggataagaaattaagaaattataatgttattttattatataggttagttaattatgtattttgtagagtagttgtatatatttttttaagaaaatgtatatagtgttgtatatggagttttgtaatttttttatattgattataatttaattaatttttattaaagagataaaagtgatgttttggtgtttatgttttttaggaattattaatagttataattagttttttagtaattttttaattggttgtattttaaaaataatgttttttatatttaatataaatgtattttttttttatatttgggattaatattgaaatttatgattttattatattaaaatttaaattttattatattaatatttaaaattgtattagaggttttatgatttggtattatgggtttttgtattattttttttttaaattttttaatttgttttattaaggtttttggataattttagagattttttgtgaagtttgaataaaatttttttgagattttgataattgtattagttttaggatttaattggaatagaattaaaatttttaaaataagtttttataattagaaaattggtgtttgtaggttttgtgtgtggggtttttttttttttttggaaggagttttgttttgttgttaggttggagggtagtggtgtaattttggtttattgtaatttttattttttgggtttaagtgatttttatgttttaatttttggattagtgtggattataggtatgtgttattatgtttagttaattttttgtatttttagtaaagaataagttttattatgttggataggatgtttttgattttttgatattgtgatttgtttgttttagttttttaaagtgttgggattataggtgtgagttgttttgtttggatgtttgtaggtttttaaaaagatatttttatatgatttaattaaagatttgttattaattattatggagtaattttgattttgtatatttgatttttttttttattaataaatatagggttatattttgaatttttttttttttttttttttttgtggagatggagttttgtttttttgtttaggttggagtgtaatggtttaattttggtttattgtaatttttattttttgggtttaagtgatttttttattttagttttttttgagtagttgggattataggtatttattattatgtttggttaatttttttgtatttttagtagagatggggttttattatgttggttaggttagtttttaatttttgattttgtgatttatatgttttggttttttaatgtgttgggattataggtttgagttattgtgtttggttattttgaaattattttaatattaatgaaaattataaaatttttataattattttaatataattttttagtatttaattttttgtttagaaagtagttaagagttgaaattttggaaatagaaaattttggttttagattaaatgtttattttttagatttgagttgatttgttattgattagatatgaggtgatttgtttattttttttaaatttttgtttatttataaagttagaataggatagtgatggtattgttggggtgtagaatgattttttaaaatgtggtttttgggtatgttgagtgtttttgaatattgaaaggttttagaaataagttttagaattaaagtttttttaattttgtttttttttttatatatgtgaagggattttgatattttttaattggattaagaaaattttttattagaagtaataattgttttttattttttttttgttattttattattgtagaaaagaatattgaatatggattttttaagataatgtttgttttttggttttatttaaattattaagatatattaggtgttgtggttttttttattaattttagtattgtgggaggttgaggtaggtggattttttgagtttaggagtttgagattagtttggttaatatggtgaatttttgtttttataaaatatataaaaaattagttaggtggtgttatatgtttgtaattttagttatttgggaggttgaggtaggagaattatttgaatttgggaggtggaggttgtagtgagttgagatt

SEQ ID NO: 258 - DNA, 3506 bp, Artificial Sequence
  chemically treated genomic DNA (Homo sapiens)
aattttggtttattgtaatttttgttttttaggtttaagtgatttttttgttttagttttttaagtagttgggattataggtatgtgatattatttggttaattttttgtatattttgtagagatagggatttgttatgttggttaggttggttttgaatttttgagtttaagggatttatttgttttgattttttatagtgttgggattagtgggaggagttatagtatttagtatgttttggtaatttaaatgagattgagaggtagatattattttgaaaaatttatatttagtatttttttttgtaataatgaaataatagggaggggatagaaggtaattgttatttttggtaagaaatttttttggtttgattaggaaatgttagagtttttttgtatgtatgggaaagaagatgaagttagaggggttttgattttgaagtttatttttgaggttttttaatgtttaaaagtgtttagtatgtttaagaattatattttggggaattattttgtattttaatagtattgttattattttattttaattttgtagatgagtaaagatttaaaaagaataaataagttattttgtgtttgattggtaataagttagtttgagtttgaaaggtaaatatttaatttaaaattaaagttttttatttttagagttttaatttttaattattttttaaataaagaattgaatattaagagattatattagaatagttataggagttttataatttttattgatgttaaaataattttagagtggttgagtgtagtggtttaagtttgtaattttagtatattgggaggttgaggtatatggattatgaggttgggagttggagattagtttggttaatatggtgaaattttgtttttattaaagatataaaaaaattagttgggtgtggtggtgagtgtttgtaattttagttatttaggggaggttgaggtgggagaattgtttgaatttgggaggtggaggttgtagtgagttaagattgggttattgtattttagtttgagtgaaagggtgagattttgtttttataaaaaaaaaaaaaaaaaaaaaaatttagagtataattttgtatttattaataagaaagaaaattaaatatatggaattaaagttgttttataatggttgataataaatttttagttgggttatataaaagtgtttttttaaaaatttataagtgtttaagtgaagtggtttatgtttgtaattttagtattttgggaggttgaggtgggtggattatgatgttaagagattaagagtattttgtttaatatggtgaaatttgttttttattaaaaatataaaaaattagttgggtgtggtggtgtatgtttgtagtttgtgttaatttggaggttgaggtatgagaattgtttgaatttgggaggtggaggttgtagtgagttgagattgtattattgttttttggtttgatgatagagtgagattttttttaaaaaaaaaaaaaaattttatatataaaatttataaatattaattttttagttataagagtttgttttaaggattttaattttattttaattaagttttaaagttaatgtaattattaaaattttgaagagattttatttaaattttataaaaggtttttaaagttgtttagaaattttggtgaaatagattaggaaatttggaaaggaaataatgtggagatttgtagtattaaattatgagatttttaatataattttaaatattaatgtaataaaatttaaattttggtgtaataaaattataaattttaatattggttttaagtatagagaaaaagtatatttatgttgaatgtggaaaatattatttttaaaatatagttgattaaaaaattgttggggaattgattataattattgataatttttaagaaatatagatattaaaatattatttttatttttttaatagaaattggttaaattataattaatataaggaggttataaaattttatatataatattgtatatatttttttggaaaaatatgtgtaattgttttgtaaaatatatgattaattagtttgtgtgatgggataatattgtagttttttaattttttgtttttttttgtattttttatagtattgatgtatattttttgtgtttaaaagtaattttttaaagttttataatgtggtaataaaatattatgtatgttataaaatttagaatatggaaataagaagtttgttttttttttttttttattttggtttggttttttagatttttttttttttattggggtgggattttttgttgattttttttaggtttttagtttggtttgttaattgttgtataaaggtgttgttttaggttagagtttttataaagtgttgggtgagattttttttgtttgttatgtttggttgtggtaaaggtgggaagggttttggtaaaggtggtgttaagtgttattgtaaagtattgtgtgataatatttagggtattattaagttggttatttggtgttttgtttgttgtggtggtgtgaagtgtatttttggttttatttatgaggagatttgtggggtgttgaaggtgtttttggagaatgtgatttgggatgttgtgatttatatagagtatgttaagtgtaagatggttattgttatggatgtggtttatgtgtttaagtgttagggttgtattttttatggttttggtggttgagtgtttttttttattaataaaaggttttttttagggtttttatttttttagttgaggagttgtgatgtttgtttgtttagtttttttttattatttgtttgtgtttgttgagtttgtgttgttattggagtatgtgtttttagttgttgtaagtaggtattagttattaattgttttttagtaaataaaatatttaatataatttgttttaggtgttttagagtttattgatatgggttgttgtgtagattgtagtgtagtgttattatggtttattgtagttttttgattagttggaattttgtgtttattattatgtaaggttaattatttttttaaagattgggtttttgtgtgttttttaggttagttttgatattttggttttaatttttttgtttatgtttaatgttggtattatagtagtgagttattatgtttggttatgatattgttgaggttttagggttagttatatttaaggggtaatttttgtagtgtagtggggaggaaagttaagtagttataggtttttggtgttgtgaatttaattgttgaatatagtaagaatttattatgtaataatttttaattagtggattgtaaataagtttagtttattggttttggtttaatttttgagaaaggtgagaatttgaatttttgagtagaaatatgtagtttattagtataataaagtgattataataaagattaatttattttttgttatttaatgtgggtagagttttattgttg

SEQ ID NO: 259 - DNA, 22489 bp, Artificial Sequence
  chemically treated genomic DNA (Homo sapiens)
ggttgttgggagatattgtggttagtggggtggggggtttgggtatttgtttttagatttttggttattttaagtgataggaaggggggttagtgaggatatgaatagtggttgtttttatttttaagggttggttttattgtttttttatttttgtttggtttagtagttttgggagtagttattttgtagtttatgtgtgtggggattttgttgtgttttgagttgttgaagtagttttttattgggtgttgtgttgggtttttgtttttattttgtagggaggaagtatagttgggggagtggttttttgagggtttttgggagtttagattttatttttggaggtagttttggggaggtttggtggagattttgtttttttgttgaagttgttgttgaagagtgataggtttgtttagtgttgggggagatttgggatttttagagggagtgtaggatagggtagggtagggtagggttatgatttttggtgatggttaggttgttatgggttgaattgttatttttgggtttgtgggtaggtgtttagttttttaggttttattttttttatttaaggaatgggatatgtatatttttgtttttagggtggtgtagagaataggatggtgtttttgagtagtgtttttaatgttgtttggggtttgggaatgtattaggatttgataaataaatattagtttttaatattttgttttttgtaaggagaaggttaggaatgttttgtttagagagaaggtgagtttatgagtagtagatagttggtgtttaataggtgtttgtttttttttagagttttagggtgttagttggttagagtgagttttgttgattagggagttgtggtagttggttgggggttggtttttggggtaggtgggatgtttgtggggttggtgtaggtttaggttttgtttgggagtgttttgttttgagtattggtttggatatttgagttgagttttagataggtgttttggggttgatttggtaggagtagttgttatttttgggtagttgagtttagtagtgagggttggtagaatgatttagatgaaatattgaatttaatagtaaaattattttttttgagggaaaatatgatttgtagttagttggtgtgtatatatggggtttggaaaagaagagaattttggagatataaatggttttatgtgttgttgttttggtttggttgttaagttattaaatttttgtatagggaaaagtgataaagtaaatatttattttttttgttgtttttagaagtgaaaggtttttgagatgggaaatgtagatggtttgtagagtgttttatttaaataaaattattagatgtttgaagattttgggagaaatgggtttagatgaattatttgtgtaaagttatttagtattttgtaggggttttgaagtttggtgttggtaaggtgtttgttgttggagtaggggtggttgatggatttggtgtggggtgggtgggaggagttgtagatttagatgtaggaggtttggtggggttattgatttatgtttggtttggggttttgtttttggggttgggaggggattaggttggggaagttggggagggggtttttttttttttttttttagttgttaggttgttagtgggagatataggttttggggattaggttttgtaattttttttgattttgatgtttgagattggtttggtgttggttttgaggtttttgtgtaattttagtttgggttggttgtggaggatttttgagggttttttggtaaggtttttttttttttagttggttatggtatataggattttatttttttgtatgtttagggtaggtattgttaattgagttttgtattttttttaattttttgtattagggtttattaggtttatttatttttgtgtttagattatttggttgatgggtggttttgttttaggaggaataggggtttttttgtttttttagagtttttgttttgggttttgtatttatgttttggatgtgttgttttttttatatttgggagttatgttgattttttttgtgtttttttggggagatatttttttgtattagagattggttttttggggtttgggtgtgggggtggggatttggatgttgggggtgtagaggttatggttttgttattttttttgattttgttatgagagtatgattagggtttgttggttttttgggttttgatgtttttgggtttggtatttttttggaagttttatttatttttttttttttttttttttataaggatttttttattgtaattttgtatgattttattttagttgattaaatttgtaaaaatggttaggtttggtggtttatgtttgtaattttagtattttgggaggttgaggtaggtagattatttgaggttaggagtttaagattagtttggttaatatggtgaaattttgtttttattaaaaatataaaaaatagttgggtgtggtggtaggtgtttataattttagttatttaggaggttgaggtaggagaattagttgaatttgggaggtggaggttgtaatgagttgagataatgttattgtattttagttagggtaatagagtaagattttattttaataaataaataaataaatttgtaaagatgttatttttgtgtaaggttatatgttgaggttttgggtggatatgaatttgggggatattgtttagtttaggataggaattaattgtagtagggtagttgttttgggtatatagtttgattggtatttatttttggtaggttttttggagtttggtttttttattatggggtgggggttttagttatttttttgggggagtttttaatttgaggttttttgtgttggggtttagttagggtgggggttgtattttatttttggagtaggtatgttgggttttgatagtaagttggggagggttttagggttagaggaggatttaggggttgaaggtagtgatgggtttagtaggtagtagggagggtagggtaggggaggggtgttaaggtttataagtgagaggaggtaggagggaggatatggtatttatagttgtggtggaggagggagggtgtttataaggtgggtttttagtttggagttttaggtattttttgttgtggttattgattgttggggaattgattagttttatagtatggtatggagttgggttaggtagggttggatgtttgttaggggtattgtaggtgggttattaggggttggtttggggtttagttgttatttagttgatatgggattattaatggttgttatggtttaggtattttttttttgttatgttggggatattgtgatataggtttttaggttagtgaggatagtgtgggtgttggagtttggagggaggggagtggtattggggaggtttttgttgagtttggatagtggggtaggtggaagggtgtgtgtttggttgtgtattttgggtttggtgagtgtggttgaggggtatagttgtttttggttggggttgtagtgagtgtttagtttatttggttataggttggttattagggatttggtgtttgttatttataggattgaggattttaatagtagttttagtttaggttttgaaaagttgagtagagaagggtaggaggtttttgtatttttgggatttatttttggtaggttgggttgggttgtgggggatatatttgttttgggggatgtgggaggggggtgtttttgggtttgtagttgttggttttgaggatagatgtagtttttttagtaatagttgggttggaggtttgggagttaagagagattagagtttaggttagtttggtttttattagggattagttattttggttatagatgttagtaggggggatttttagggggtgggtattaggttggggtgggtagttggggtgggttggggttgtagtgtttttttatttagttttgggtataggatgagttagtttttatttttgtttatttagtattttgtaggggttgttgttttgttgagtgtaggatgttgattttaggatgttattatttgatgttgtttaggttttttttttagaatatttgtttagtgattatagttattttagttttttttattgattttaggtagagtaaggggttttatttgtatttagtaggtgtagattgggtagggtagggttttaggagggtgtatgtttggggagtttttgtatgtagatagtggggggttagggaggagttatgtgttgggtataaggtagtttttgtaggttttttgttgggtttgttttagtatggagggattggtagtatatagtaggtgtttagtaaatgttggggggtggggataagtgagtatttatggggggaagtattggttgtggttttgttatttgttttggtagtatttttatttaggttttggatgggtggtgattattgtttttttgtttttggggttttgatttttagtatttggtagttggggatttggttttttttaaggtttgggagtagttaagtggttaggtattaagtggtaaatttaggttagggttgggtgatggtttggagggtttttgtggtagttgagttttgttttttttggttttgtttatttttttggtgttgtttatttttttggtttgtatatttttttggtttgtatatttttttggtttgtatatttttttggtttatttaggttgttattggtttgagggttttagtgaggatgagttggagatggatattgagggggttgatgggtttggggtaggttggttggggtaggggggttgggtttgtttagtggttgtttgtttttagaagaatgatattttgtttttttttttgtttgaggaggtggggtgagggttagattttagtatttatgtttttgttttttttttttttgaaaagtttatagatttttatttgaattgttttagtagagtttaggtggggtattatttttatttatatatataaagggttgagatagtgtagtttggtgtgtgagtagttttggtgtttttaggttggggtgttgtttgtttgtttatttggttatggtttttaatagttggtttagtaaaggataggtagattttatgggttaaggatgtgttggtttggttggtgtggggttaggtgggtagtttgttaggatttggggattttgagttagttgttgtagtaggtgtggttggtttagttaggtaagttttgttgttgggagggttgtttattagttgttggagggtgtggggtggttgggttggttatttgttggtagtaaagttagtagagagtgggtggggttgggggaggtgggagggttttagttttatttttagggtttagtttttttgggttttgtagttaggttaggaaggttagttgggttggttttgggttttaggttttagtttggaaattaggggttttaattttggtatgagaaagtttttgttatagggtaggaggagttttatatagaatttttaatttttgtttttgggtttgagtttggtaggattggatgttggatattggtgttgttgggagttttgagaattgtatgtgtgttttttagtggttagtgttggttgtgttttgtttgattttttaggttttgatgtggggttttggggtttagggagttgaggtttggggtgggggttgtatggtggtgtggtttttttagattgtaggattagagggtagttttgaaagtttttttggttagggagttggtttgtagagttgaaggggaggagggggttaggaggttgtttgtggttgtggttttgaaaattaggttttgttaagggtttttgagggttagttggggagggaagggtatatagtgtgtttagagtaggattttagggtgtttgggtttagtgtttttggggataaagggagatggagtagaggggttttagggaggtttgttttgtggtggtataagagttattgtgaatattttgttttggtgaggttgtgttttaggtgttaatagttatattttagtatattaggtgtaagttattttttataggttttagtttgttgtaggaattttaagttttaggttgggaaggaatgggtagggttgttgtagggattgtggttttgtaggatgagggtttgttaggggtgtttaggggatagtgggttgggatgtgttggggttgttgtagggattgtggttttgtggggtgagggttggttggggtgttggggttgtttttgggtggttaggttttatttgagagtttggttatgggatttaaggttagagggtggttgagttgagggttgtttgttttgggggggtttttggttttaaatttatttatttggggggtggtattgaggtaggtttttaagggtagaaaggggagtgatttggtaaaggtagttttgtgttgtttttttttttttgtttatgttatgtatattttaatgaaataagaaattttttttgatttttttgtgggtttggtgatagtggtattttgtttagtttagagtttttaattttttgaggtagtaggagtatgtaggtgggtgggtgtaggagttggagtgaatatttttgggtatagtaggagtagaattttgtgtagttttgtggtagtgtttagggtagtgtttgtgatttgtgaagttttagagggtgtgtgttatagtgtttttagttttgttgtttaaggatgtttggagtgtttaatagtttagtggattttttgtttttttttgagggtagagggttagtgtgatagttttttgtattttaagtttttgtttagtatttaggaaatattaggttgtatgaagaaattgaaggatagtaaatgtaagggattttatggttgatggagggagggggatttggaaaggggggtggagggggaaggtgatggaagaggtttttagagggagggagagttggagagggggtggagggggaaggtgatggaagaggtttttagagggagggggagttggagagggggtggagggggaaggtgatggaagaggttgttagagggaggggagttggagagggggtggagggggaaggtgatggatgaggtttttatagggagtgggagttggagagggggtggagggggaaggtggtggaagaggtttttagtgggagggggagttggagagggggtggagggggaaggtgatagttttttgaagttttgttgtttttattagatttttttttaaagttttgttgtttagttgtttttttgaggttatgttgtttttttttgatgttaaattgttatttttgatggttagttgttttttttttttttgtttgttttgttttttgttaataaggttaggagtttttatgggtataggatgggggtggggtgaggtagtggtggttttggaaaaggtagtattggagtagggaaattggaatgtgtgtttttatttagggttatgtttttaggtttgagggtggggttttttaggaattttatttttttttatttagaatttttgttttttgtttttattattgagggtttgtgaggttgatagtatttatttttaaagaaggattggtttgggtagggttgttaggagtattagggtagggtttgttaatttagaggtttttgaggaatagatttaggtttgggaatgggtttatggtagggtttttttggaaatgtttggtagagtgggtaggggatgttattgtgattttgtattgttggggatattaggtttagaggggttgattgattagttaaggttgtataatagagttgttgggagtgggtttttgttaggttgtgggatatagggattttggtttttgttgtttttgttttagttttagtttaggatttattgtggttgttattgagttttagttttagagttgtttattaagtttgattttatgtagggtttattgtgtttattagagggtgttagaagttggtggttttgatattgtggtttaaatgtagggattgtttggtgggggttgttgtaattttttttttggtgtgtttaggtttttttttgagggtttttagggttggggtttggttggggagagaattaggtgtggtggagttggggagtttggtgttgggtagtgggtggtttgtgtttggggattttggtgttatttgttaggtggtagggaggttggttttttttaggagtttttattttttgaggtggttttaagtttttgttgttgttttttttgttttatgttttatttttttgtttaatttttttgatagggtttgggtagggatgaagtagggtttttttattttggagttgggaggaggggggtgggggtgttattaagtatggggtttaggtagatttagtttatgggggatatgggggttttagggtgaggatttttggggggttggttggggggtgtttagagtttatggagagtggtttggtgggggaggttttgttagtagattttttttttttttatttggagttttggtttttattagtttttattttttgtttagtgtttggtttttgtttgtttttggttaatgttgttatttgtttttttagttaaagattttatgtttatgtgatatgattatgataggagttgtggggggttttagggaggttggtgttgggtttgaatttgttttgtgaaggttttgagtttttggttgttgtattttgattgttttgtgtgaagggaagggagttatagttatgttataagagaaggggttgttgtttttttaatttttgtttttttgtttgttttaatttgtttgggattttttagagttggttgggggttttagtttagttatttaagttgtattttgttttaggaaatttttatgggttttgattagtgtttattagggtttttaggatattttgggggtgggaagtgggggtaggttttatgtttgtattttatttgtgagtttttggagtttttttgtatattttatagggttggaggggttttgtgttttagatggagttttgttttgttgtttgggttggagtgtagtggtgtgattttggtttattgtaagttttgttttttgggtttaagggatttttttgttttagttttttaagtagttgggattataggtatgtgttattatgtttggttaatttttgtgtttttagtagagatggggttttattatgttggttaggttggttttgaatttttgatttaagtaatttgtttattttagttttttagagtgttgggattataggtgtgagttattatattaggtatgtttttgagataaggttttgttttgttttttatattggagtgtagtggtgttattatgttttaaggtaattttaaatttttgggtttaagtgatttttttattttagtttttttagtagttgggattgtaggtgtgtgttattatgttttataagttttttaattttttgtagagattggggttttgttatgttgtttaggttggttttttgaatttttgattttaagtgatttttttattttggttttatagaaagtgttgggattataggtgtgagttattgtgtttagtttagggttagaggtttttttttgttttttttttaatgtgtaggtgttttttgatgttttttattttttttgttgggtttgggttttgatttatttttttgatgttttgagtagggattggagagtgtttttaatgtgaaaatattggtttttttgtagtttagttttagttttttatttgttattatatggggaggtattatttgggtgatttttttagggttgttttttaatttttatatttttttttggttatatttaatttgttattgaagttattagttgaggtttttatattaatagttatattttttgtgttaaaggttttgtgtggttgtttttttaatttgttgggttttttttatgttattatattgttttttatttttatttttatttttttagttattttaaatttatgtataattttttttttttttttttgatagatttttattttgtggtttaggttggagtgtagtggtgtgattttggtttattgtaatttttattttttaggtttaagttatttttttgttttagttttttaagtagttgggattataggtgtttattattatgttttgttaattttttgtatttttagtagatatggggttttattttgttggttaggttggttttaaatttttgattttaagtgatttgttttttttagttttttaaagtgttaggattataggtgtgtgttattatgtttggtttataattttttaattgttttattattatttttggtttttaagatattattgattgggtgtagtggtttatatttgtaattttagaattttgggagattgaggtaggtggattgtttgagtttaggagttggagatagtttaggtaagttggtgagattttttttataaaaaaatagaaaatgtttattggatttggtggtattgtttatagttttagttatttgggaggttgaggtaggaggataatttgagtttaggggtttaaggttgtagtgagttatggttgtgttattgtattttagtttgggtgatagagtaagattttatttttttaaaaaaaaaatggaatattaaaaattagaagatggtgttgtgtttgttagttttttggggtgtgagtttattattgtgggttattttttttatggagtttaagttttagggggatatatttttatggagggtgtatgtttgtttttgttggagtttgggtggtttttaggttttggaattagattttatattttttattttgtttattggttgttagtggtgttttatttgtgttttggtgatagaggtagtgttttgggggtataggtattggtgttagttttgagtttgaattttagtttggttttagttagttgtatggttgagggtgggtgggggatgtttttgttttgattttttatatttttatttatagtgtagttttattttttttataggagttggagggttatatgggaaaataggtatggtagatgtaaaaggtttagtggaaatgttggttttttttgttgttattattgtatttatttggtaattttgtattataatttgagatttagaagattttatgttttaggtggggttgaataggatagattttgaagagttggtttttagattggattgttaataattaggttggattttgtgtttttagttggttagtgttttggtaaggtaggagtgggtgaaatttttagtttttttagggagtagttagatgatgatatatttatatttgtttatagggagggagtgtgataaggtttgtggttttttgtgtgagaattggttagtgttttttggggtttgggatggggttttagtatttatttttattattggggtttgggagggagggttggagagtttttatttggtgttgttggtggttattttttagatagtgtgggtgggtttgtaggttttgggtaaatgtggtgttgttatagttttgttttatagggatagtggttagtagttgtttttggttttgttgtttttaatgaagttatagatggtagtttttaaatgtttttagaaatggtagagaggtttttagagttgatgtgtaaataaattgttttttaggtttggattatataattttgttgggattaagtataggtttgggttttttggttgttttttagggtttggttttgttgagaggaggaagtttggtttttgggagggggttttaggtgttttttttatggagtttagtaatttggtaggtgggggtgggtattgttttttttttgggattttatttttttggtaattagttgttttttttttttttggggttttaggtggtttttatggaggggtgggtgggattgaggtttgagttttggggaggagttggttggtgagttatgtattttagtggttattgtggttagttggggaggttgaattttaggttttagtatttagaagttggtggagtgggttgaattgagtttttttaaaaatgtatgttgaagttttgattttgggtatttgtgagtattggaaatggggtttttgtgaatgattgagttaagatgaggttggatggggagggttttaaaagtaatgattggtattttgtaaggaggttgttgatagtagggagaagttgggtgtgtgatgttagaggtagagattggagagaggtagtttaggaatattatgggtggttggtagtgtggagtggtagggtttttttttggaggttttggagggagtgtggttttgtggatattttgattttaggtttgtggttttagggttggaggggttgtgtttttgtggttttagtttttagtttgtggttttttgttatggtagttttgggagatttatataggtggtgattgtggataggatttttgatttttgggttatagtttttttattggtttttgttatggggtaaataggtttggggtggtgtttaggttggggaattgttttagttgtttgttgtttttgttgtggttgatggggttgttttggttgtagttttggttttggttttttgaggttttgtattttttttggtatttattggttgggtttttggggtttttggttattttgtgggtgttgattgaattgggataaatgttgtgtgtagttaaggggtgatttaaggttggttaggtttagagttgattttaggttgggaatagtagtagtgatggtgttggtatttattgtgttttttttagggtttggttgtgggagttgaggggatgtgtttgtggtttttgtggtttgagtttggaggttagtgtttagtggtgtggtatttgggtatttttgttatttgtttgtagttagtgtgtttttgtggggggtagtgaggtgattgggtttttgttgggtgtttttggaaggtttagaggtaaggatttttaggtagagagtttgggggtggttttaggaaatatttgttattgagggggtgttgtgaagggaaggggtgggtgttaatgggtagtagtgagtaggttattgttgtgggtagattttaggaggtagtattttggagttgtttttattatagggaagtggttaggttgtagtggttgtattttagggtatggatttattatatttttggttgtttttatgtttaggttaggttttttgtggttagagatggttagagttataggggttgtaggaagtggttgtaggtatggttaggggtaggtggtatttgttttgagggtttgtatgtggtttttttgttttgttagtttttgttatgtgggttttgggaaattggtgtttaattttatgagtagttttgggttttggggttttagattttttaatgttgttgtgtttgtaggaggtgttttggggttttagattttttaatgttgttgtgtttgtgggaggtgttgtgggggttttggattttttaatgttgttgtgtttgtgggaggtgttgtgggggttttagattttttaatgttgttgtggttatgggaggtgttgtgggtagggttgattttggggtttagttggtttttttttgtttaatgttagagaagggaagtgttgagtgtttgagggggattagtaggggaagggggtatagttaggtttatggggtgattaggagtagagattttattttattaaagtatatatattggttgtgtttgaggggaaaggagtttagggaggtggatgaggtgggtagggggtgtttgttgttggtttggatgtttaggggggtattttattgtttttggggttggtaggttttagattttttaagtttatggtgttaaatgtgattttttatattgggtggtagtggttataattgtgaggggtaggtagtggttgtttggatggggatgtgtttgttttttgatgaggagtttgtgttttatttaagttttttatttgtatttttggtggggtatttgtggtttagtttggtagggattttgagtttgggtttgtgggggtgtggtttttgggggagggtaaattttggtgggtattggttattggtgagttggtgttgtggttatagtttttatatttttagttgttgtaggtttttgtttttgtatgttatttagtgttatgtttttgtatttatgtagagttatgttttatttgtgtgtttatgttgatttattattgattttttttgagtgaggagtttttgttaaatgttattaggtttttagtttttagatgaaatgaaatggttgatgaattattatattttaatatattaggaaagatggatttatttgtatttgatgagtaaaatgtatttttttattgattgaaaagttgatgaggtaaataaattagggaaaatggttttttttttatttttttttgagtagtaaattaagtgatttaaaagagttttgaatgagttaataataaaatgtttttaaatgtggaaatgtgaagtgtaaatattttagttttattgttagtgtttattgaggatatagtttgttttttgttttgggaagttgggggttgtggaggattttggttatttggatatttagttatattttaaagtttttaaggggagatggggtttttagtaagtttgtttggattagttaagatgaggggttttaggagttaatatagatggagttgttaggtgtggtggtttaagtttgttattttaatattttgggaggttaaggtgagaggattatttgagtttaagagtttaaggttagtttgggttatatagggagattttttttatttttaaaaagatttttaaaaattagttaggtttgatggtatttgtagttttagttatttgggaggttgaggtgggaggattgtttgagtttaggtattagaggttttagtgagttatgattatattattgtattttagtgataggtgagattttgtttaaaaaatattttataataagagagagagagggagggaggagtttgtattggttgaattattttagtgttttggggttgttgtagtgtaggtttataatattagaaatttatttttttttagttttggatgttatgagtttaaaattatggtgtgggtagtatgtagtatattttttttggaggttttggggaggattttttttttttttagttttgggggttttatgtttttgttgtggttgatgttttagtttttgtttttgtttttatagggtttgttttgtgtatttgtttttattttgttttgttttttatggaggaatattagtgattgatttgggatttagttttaatttagggtgattttgtttttagatttttaattatatttgtaaagttttattattagggaaggttgtattttgaggttttgggtggatatgaattttgggggtaggatattgtttagtttagtgttgggtgttgttgtgggttaggttttttgatttttgtaagtttatgatggttatagagttttaaggaggaggttttttggaggaggtggtttagtttattagagaattagtatgttttttttttgggttttgggattagtatttttaatgataagtttttttggattatgttgatttgggttgagatttgttgtttgttgtgtgttttgggtggaggttagataggttgtgtatttttaagttttgatatgttttttttttaaagggtggaggttttatagggtgagtgtaggttggggatgggttgtggggttgttgggaggggattagtgggggtttgtagtgtttttgggagggtttggggttgggggtaattgagatttgttttggtgggtgagtggagaagtatttggggggttttttttagtgttggagagaaatgggtgatgaagtttgggaaaggtgtggggggtttgaagtgtgtattatggtgagaaggttgtgtgtggttggattttagtttttttgtgtttgtgaaaggttgagttgtgttggttgggggagggttggaggttgttgggggttgggggatgaagagttgggggtagtttagggtagtgtattttttgtggaggtaggaatggtaggtggtgtgatttttattaggatttttgttattggaattgtgggtttttgttgggttggaggtgtttgagagatttttgtggaatggtgtgtgaatttgtggttgtggtggtgggtttggatggagatggatgttggatgggttgttttttgagtttggtttttgtggtggggttggttttttgtttttgtatttggtagatttgatgtggagtttgagggtggttgttggtttggggtggggaaggggttttttagattgggggttttatttgttgggtttggggagtttatttggttttttttgattggtttggagttgtaggtgaggttattttaggaagttgttgtatttgagggagtttgggttgttttgggggatgttggggtttgatttttggggttgggggttgtatgggtgggttggggtttgtttgggttggggtttgtggttgtgtggggtttggattggtgtttgtttggtttgggggtttttagttgtatgtagtttgggttgaggttgggggtttgtggttgtgtggggtttgggttggggtttgtttggtttgggggtttttagttgtatgtagtttgggttgaggtttgtagttgtgtggggtttggtttttatggtttttgtgtttggattttgttttttaattattttttttgtatgtttttttggaaaaggatatggggtttagggtggtggatgtggatattttttgaaatttattagttttggtttgtgatgtttggatggaggggttatagttatgttggtttttagtttttttttagatattttagtttttggaggtagggtttttttgtgaggtgtattatttttgagtgttttatatgtttgtttttgggtatttttttgggtggtggtgtggtgtggttttgtgtttttatttaaattttatatggaaatggagtttgtagtgtgatggtggggtttggtggggagtgattgggtagtaggggtggattttttgtgaatggtttggttttgttttttttggtgttgtttttgagattgtgagtggttatttaattgtgttttgtatttgttttgttttttttgtttttgtttatgttatgtgagatatttgtttttgttttgttttttattatggttggaagttttttggggtttttttagaagtagaaatatttgtgttttttatatagtttataaagtgtgagttaattaaatttttttttttataaattatttagttttagggttttttttgtttgtttgtttgtttgttttggtggaggtgggggtggatagtgtttttttttgttgtttaggagggagtgtagtggggtgattttagtttaatgtattttttgtttttgggttgaagtgatttttttgttttagttttttgagtagttgggattatagttatgtgttattatgtttggttaatttttatatttttagtagagatggggttttattatgttggttaggttggttttgagtttttaattttatgatttttttatttttaatgttttgttttggttttttatagtgttgggattataggtgtgagttattatgtttggttgtgggtattttttagtagtgtaaggatagattattgtatttggtgaatgtttttgatggtagtaatgaggtatatttgggggtgttttgtggtagatatatttgaaggtggttggggttgttagtgagggaatttgggaggagttaattggagatttaagttttttttatgagaaatatttgagttttggtttgttttgtggaatttgggttatgttggggattgaggttttttgttttgggtttaatggaggttgtgggtggaggttgttgggggagggtgttaagtgaaaatgttgtagggagggtgtgtttttggtgggggttgtggttttgtggtggttgtggtttttgttgtggttgtgatttttgtggtggttgtgattgtgggttttgtggtggttgtggtttttgagatggttgtggttttgtagtgggtgtagtttttttattttatttgttgttgttggatttttttttttgtgtgtagtttttgttaggattttatgtttggattttggttttgggttttttttttggttttgtgagattggtgttatttttattggagttaataggtgtttggtatagttatttttagttttttttgtttttggatgagttggtggttgtttttatgtaggaatgttgatagtttttggtattatatagggttaggattttggttgtgattttttttttagtgattttttgtgggattgatggttagagagggggtttgttggttttgtagtgttttttttattattagttatattgagttttgggtaggagttttttggttttggttttatttattttaggaggatttagtgagtttagtttttatttgggatattgtagaggttaagtttattattgtgaggtttagtgggtgttgggagttatggtaattttgtagggatggtttttggttttttttttagggattttattttagttgtgatttgttttatggtatttgtattgtgatattttttttgttgtttatgtggttatgagggttgttttttgtatgtttatttttgagttttagttttaaagtagtgttgggtttattaggtttttttgtggatgttgtttttgtttgtgtggtgggatgttaatagtttttgtgttatgtggttgttaattttggaagtttgtttttttttttttttttttgttatggttttgtttttatattttgttgtttgagttagtgtttatggttgtattagatgttaggtttggttttagttgaggggttggtgttgtgtatgtaggtagggggtttggtaatggggttatattatttgtatgaatggttttgttatttttttttgttttgtttagtataggttgagtttatagtttagatagtagtgttttgagagttgtttggtatattttgggaagaggatgaattttgttgtatggggaggttttggttttgagagttgtttggtatattttgggaagagggtgaattttgttgtatggggagtttttggtaggagtggggttgtttggtgattgtgtgaagtattttttgggatgaattagggttttgttaaagttgaggttgggttgggatttttggggttttattgtttgggatgaggtgggttttagttgggttgtggtaggggttaggaggtatttgtatttgttttgatttttttttttatatttgtagagtttttttatttattgaaaagtagggtgttttgggtgggttttggtttgagtatttagagatttagttttaagttaagttttttattttttttgagttttagtttttttatttttaaatgaagatgtttaaggagagtaggttttgttttttagttggatttattagagtgtatagaggtgtttaggagagtaggttttgttttttagttggatttattagagtgtatagaggtgtttaggtgagtaggttttgttttttagttgggtttattagagtgttgttgtaggtttgaggttttatttgggtggtataatttgttggtggaggaaagagttgttgtagtttaggtgggattggggggtttttatgattttttaggagggtgggggttttgtgtgggagttttttattagttttagatgtggtttttagggtatatttatttaaattttttatttttatttttttttaagtgtaggtttggtagtggtttttatttggggttgggagggggtaggtttttggtgtttatgggatgttattttatattgggtattggtttaggtgttaggggatagagtgggtattttagtgggttgtgtgggtgagggttttagtattgtttttgttttttattttgaaggttggagtagtttgggaagttgtattttaatgagtattttattttaatagagtgtttattgaagtttgagattatggttaggagggttagttagggttttaggggtgggatttaggtttttgtagaaggttttatttttgaaattttttgagggtttttttgtttttgtttggattttgggttatgttttgtttttggtagttgtagtttgtattttattttagatgttttggtgggaagtttttgttgttgggtttttaggttggaatttgtaggatgttagggtattttgtgtttttggggatgttttgtggtagttttttgaggtttttagatattaggatatttttttagtttagttttagtaatatatgttggtagtgtttgtgttagtgttttttttttttgttgggaggttggtgatttgttgtgttgttttggtggggggttgatttttgattttttgtttggtgggttgtgttgtattagttagggttgggaggtgtatgtggatttgtgtttattggaattttgttgtgattagatttgggggtgatgttgagatttattaggttttgtggttttttgtgaatatttgtaggttgttgggggtagtggttgatggaataagtgtggggtggtttgggttttttggaggaagtgttgtttgagttgttaggggagttatttgtagaaagggaggtggggtgtattaggtaggggggtagttagggtaaatgtttgatgtttagagggtgatagtgggtagtggggttttttggaggagtggagggagggttttgttggttgtagggtagagtgttttatattttttttggttgttatttttagggtttagtttagtttggggattaagatgagaggtttttggggtgttttaggtgagttggagttagtttttgttgtttttgaataattataggggagttagtttagtgattaagtttttgtttggtgggggaggggtatgggttttgtgtttgggagttgttgtttttagttttaggagagggggtgttatgggttgtgggataggttatagttagggtggggtttttggagaggggtttgaggattgtttttgtggagtttatttagttattattggttgttatggttattggtagtttttaatttttatggtgttgggtttgatttttgtagtgttttaggtgggtatgattttatttgatttttttggggtgggtgggattgaggttaggggatttttgtttagaatttagggtggttgatgtggggaggggtattgtggggttgataggttttttttttggttattaggtttttaggagggtttaggtgtttggaggtggggggtgttttagtttgatgttggggatgtgagtagatttagtgtttatttatttgtagggttgagtttttattgggtgttgggttgtgatttgtatattggattttgtatttttggggtatttagtgattttagaatagtgggattttagaggttttttagggagttttagaatatgatagatgggggtttaggtgtgaggtagtgggagttggaggaatatagttaggggttgaggtgagaattatgaggatggtgggtagaggttgaggggaggggtagtagatggagatgggggaggtgttaggggttataaagggggtttttagaggatttgttttgggaagttattgttgtgggagggtgggagggatatagtttaggtatttttagagaggatggaaaggtttatggggtggattttgggtaggggatttgggattagtttgtagttttttttgagggtttggttatggttgtaggttggggaggaggggaggggattttggggttaggtgttatggttttttaagtatttttgtttgatggtaaatataatatgtgttgtttgtagaatatgtggaaatattgaaatgtttaaaggagagaatatggttttggtatttggtttttaagggagttgttggtgtttgtttaataggagttgattttatttgtgaatagatggtaggtggttgtttttatgtttttttagagaggggttttttgagttttgttgttatttgggggtgttttattttatttagttagtggtggggttttttgggttggtatagagttaggggagggggttgggggattttttggtgggaaaatgtttggtgatttttagtttttgtgtttagtgggaggaggtgtttggttttgttttttataattagtggtgtttatggtgggtttggggattagtattttgggagttttttaggaatgtagatttttaggtttttattgtttggggagttg

SEQ ID NO: 260 - DNA, 22489 bp, Artificial Sequence
  chemically treated genomic DNA (Homo sapiens)
tgattttttaggtagtgagggtttgggaatttgtatttttgagaagtttttgggatgttgatttttgggtttgttgtgagtgttgttggttgtaagaagtgggattgagtgtttttttttgttgagtgtggaggttggggattattggatatttttttattaggaggttttttagtttttttttttgattttgtgttgatttagggagttttgttattggttgaatgaagtgaggtgtttttaggtgatagtagaatttggagggtttttttttgaggggatatgggagtagttgtttgttgtttgtttataggtggggttggtttttgttgaataggtgttagtagtttttttgaaggttgggtattgggattatgtttttttttttaagtgttttagtgtttttatatgttttgtaagtagtgtgtgttatgtttattattgagtaagagtgtttagaggattatggtatttggttttaaggttttttttttttttttttagtttgtggttatggttaggtttttaggggaggttgtaggttggttttaggttttttgtttagaatttgttttataagtttttttattttttttggaggtatttgggttgtattttttttatttttttatagtagtggttttttaaggtagattttttgagaattttttttgtgatttttaatgttttttttatttttatttgttgtttttttttttagtttttgtttattatttttatggtttttgttttagtttttggttgtgtttttttagtttttattgttttgtatttgggtttttatttgttatgttttggggttttttgagaagtttttggggttttattgttttggaattattgggtgttttaggggtgtagggtttggtgtgtgagttatggtttagtgtttagtgggagtttagttttgtgggtgggtgggtgttggatttatttatatttttaatattaagttgggatattttttatttttaagtatttgggtttttttgggggtttgatggttagagaggggatttgttggttttatagtgtttttttttatattggttattttgagttttgggtaggagttttttggttttagttttatttattttaggaggattaaatgaggttatgtttgtttgggatgttgtagaggttaaatttagtattgtgaggattaggggttgttagtagttatggtaattgatggtggttggatggattttgtagggatggtttttagatttttttttagggattttattttaattgtgatttgttttatggtttgtgatatttttttttttgaggttgaggatagtagtttttggatataaagtttgtgttttttttttattaggtagaggtttggttattgggttgatttttttgtaattatttaaaagtaataggggttgattttagtttatttggaatattttagaggttttttgttttagtttttagattgggttgggttttgggggtggtggttaggaggagtgtggggtattttgttttgtagttaatagggttttttttttgtttttttaaagggttttgttgtttattgttattttttgagtattaggtgtttgttttggttgtttttttgtttggtgtattttatttttttttttgtaggtaatttttttggtagtttaagtaatgttttttttgggaagtttgggttgttttatatttgttttgttgattgttgtttttaatagtttgtagatgtttataggaggttatggggtttggtgggttttgatgttgtttttgggtttgattatagtaggattttaataaatatgggtttatgtgtattttttggttttggttggtgtagtatagtttgttagataggaggttagagattagttttttattggggtagtatagtgggttattagttttttgataggagaagaaaatattggtgtaggtgttgttggtatgtgttgttgggattgggttgggagggtgttttggtgtttgagagttttagggagttattgtagagtgtttttaagagtatagggtgttttgatattttgtggattttagtttggggatttggtagtaggggttttttattaaggtgtttggagtgagatgtaggttgtagttgttaagggtagagtgtggtttggggtttagatagaaatagggagatttttaaagggttttaaggatggggttttttgtaggggtttgagttttgtttttggggttttggttgatttttttggttgtggttttgagttttagtgggtattttgttaaaatggggtgtttattaaaatgtagttttttaggttattttagtttttaggatgggaggtgggggtagtgttgaggtttttatttatataatttgttggggtgtttattttgttttttggtatttggattagtgtttagtgtggagtgatgttttatgagtattaaagatttgtttttttttagttttaggtagaagttattgttgggtttgtatttgggggaaggtgaggatgaggaatttgagtgaatatgttttggaaattgtgtttggagttggtgagagatttttatataagatttttatttttttgggggattatggggattttttagttttatttgggttatggtagtttttttttttgttagtaggttgtattatttaggtgaggttttaggtttgtagtagtattttgataggtttagttggggggtggggtttgtttgtttaggtatttttgtgtattttgataggtttagttggggggtggggtttgtttttttgggtatttttgtgtattttgataggtttagttggggggtggggtttgttttttttgggtatttttatttgaagatggggaaattgaggtttagagagggtaaagggtttggtttggagttgagtttttggatgtttaggttggggtttatttaggatattttgttttttagtgagtggaggggttttgtaggtgtgaggagggagattagggtagatgtaggtattttttggtttttgttgtagtttagttgggatttgttttattttagataatgaggttttaggagttttggtttagttttagttttggtagggttttggtttattttgggaggtgttttatgtggttattaggtagttttatttttgttaaaggttttttatatggtaagatttattttttttttgggatgtgttaggtagtttttggggttaaagtttttttatatggtaagatttattttttttttggggtgtgttaggtagtttttggggtattgttgtttgggttgtggatttagtttgtgttgggtagggtagggggaagtagtaaagttgtttatgtagatggtatagttttattattaggttttttgtttgtgtgtgtgatattagttttttagttggggttaaatttagtatttggtgtagttgtgggtgttgatttaggtagtggggtgtgaaggtaggattatagtggggggaggaggaagggggtgagtttttaaaattaatagttatatgatgtggagattattaatattttattgtatagatagaggtggtgtttatagaggggtttggtgagtttagtattgttttagggttggggtttgggaatggatgtgtaaagggtagtttttatagttatatggatagtaaggagggtgttatggtataggtgttgtgggataggttatagttagggtggggtttttggagaggggattgaggattatttttgtggagttgttatggtttttggtatttattgagttttatagtggtgggtttgatttttgtggtgttttaggtggagattggatttattggatttttttggggtgggtgggattaaggttaggggatttttgtttagaatttagtgtggttgatggtgggaggggtattgtagggttgataggttttttttttggttattagttttgtaggaagttattgggggaggggttatagttaggattttgattttgtgtgatgttaaaggttgttggtatttttgtgtgggagtggttattaatttgtttagagatagagggagttgggggtagttgtgttgaatgtttattggttttagtggagatggtgttagttttatgaggttagagaagagatttagagttaggatttagatatggggttttagtgggggttatatataggggagagggtttagtggtagtaggtggggtgggagaattatatttattgtaaaattataattattttaaaaattataattattgtaaaatttatagttataattattgtaaaaattgtaattataataaaaattatgattattataaaattataatttttgttagaagtatgttttttttatagtatttttatttagtatttttttttaataatttttatttgtagtttttgttgaatttaaaatagaggattttaatttttagtatggtttgggttttataggataggttagggtttagatgttttttatagagaggatttgggtttttggttggttttttttagatttttttgttggtaattttaattatttttaggtgtgtttgttatggggtatttttaggtgtgttttattattgttgttaggggtgtttattaggtgtggtggtttgtttttgtattgttagaaaatatttatgattgggtgtggtggtttatgtttgtaattttaatattgtgggaggttaaggtggggtgttgggggtagggggattatgaggttaagagtttgagattaatttggttaatatggtgaaattttgtttttattaaaagtataaaaattagttaggtatggtggtatataattgtaattttagttatttaggaggttgaggtaggagaattattttaatttaggagtagagggtgtattgagttgagattgttttattgtatttttttttgggtgatagagagagatgttgtttatttttgtttttattaaaataaataaataaataaataaaaaaaattttgagattgggtaatttatagagaaaagagtttgattggtttatgttttgtaggttatatggaaagtataggtgtttttgtttttggagaggttttaggaagtttttaattgtggtggaaggtgaagtgggagtaggtgttttatatggtgtgagtgggaatgagaaagatagagtaggtgtgggatatagttaaatggttatttataattttgaggatagtattaggagggatggggttaagttatttatgagaaatttgtttttgttatttagttattttttattaggttttattgttatattgtagattttatttttatgtgaggtttgggtggggatgtagagttgtattatattattatttaggaggatgtttaggagtaggtgtgtggggtgtttagggatgatatgttttatggggggattttgtttttaggggttagggtgtttgggaagaggttgggagttggtgtggttgtggtttttttatttaggtattatagattagggttggtgggttttagggggtgtttatatttattattttgaattttatgtttttttttagggaaatgtgtagaggaaatggttggagagtgaagtttaggtataggggttatgagagttggattttatgtagttgtagattttgatttgaattgtatgtggttgaggatttttaagttaggtagattttgatttagattttatgtggttgtggatttttgattttgatttaaattgtatgtggttgaggatttttaagttaggtagatgttaatttagattttatgtggttgtggattttaatttagatagattttgatttatttgtgtagtttttagttttagaagttaaattttagtgttttttagggtggtttgggtttttttagatatagtagttttttgaggtggttttatttgtaattttagattaattagagaaggttaaatgggttttttaagtttagtaggtgggatttttgatttagagagttttttttttgttttaggttaatagttatttttgggttttgtattaggtttgttaaatgtaggggtgaggggttgattttgttatgggaattaaatttaggaaatagtttatttagtgtttatttttatttggatttgttgttgtggttgtaggtttatgtgttgttttgtggagattttttaggtgtttttggtttggtagaaatttgtggttttgatggtagaggttttggtgggaattgtattgtttgttgtttttgtttttgtggaggatgtgttgttttaaattgtttttggttttttattttttaatttttggtagtttttgatttttttttggttggtgtagtttagttttttgtagatgtgggggagttggaatttgattatgtgtagtttttttattgtggtgtatgttttgggttttttatgttttttttaggttttattatttatttttttttagtgttgaaggaaattttttagatgtttttttatttatttattgaagtaggttttggttgtttttagttttgggtttttttgagaatattgtaagtttttattggtttttttttggtaattttatggtttatttttaatttgtatttattttgtggggtttttattttttggaggaaggatgtgttaaagtttggaggtgtgtggtttgtttaatttttgtttaaggtgtgtggtaggtgataggttttagtttggattagtgtggtttaaaaggatttattgttaaaagtgttggttttagaatttaaggggaagatatgttggttttttgatgagttgggttgttttttttaggaagttttttttttggagttttgtagttattgtgggtttgtaagagttaaagggtttggtttatagtggtgtttggtattgagttggatagtgttttgtttttaaaatttatgtttgtttagaattttagaatgtaattttttttggtagtagggttttgtagatgtaattaaggatttggggatgaggttattttggattgaggttgagttttaagttagttattggtgtttttttatgaagagtagagtagaatagagatagatgtatagagtaggttttgtgaggatagaggtagggattggagtgttggttgtagtaggggtgtggagtttttagagttggaagagggagggattttttttagggtttttggaaggagtgtgttgtgtgttgtttatattgtgattttggatttgtggtatttagaattgggagagaataaatttttgatgttgtaagtttgtattatagtagttttaggatgttgaaatagtttagttggtgtaggttttttttttttttttttttttttgttgtgagatattttttagatggggttttatttgttgttggagtgtagtggtgtgattatagtttattggagtttttaatgtttgggtttaagtgatttttttattttagttttttgagtagttgggattataggtgttattagatttggttaatttttaaaaatttttttagagatgggggaggtttttttatgtggtttaggttggttttgaatttttgggtttaagtgatttttttgttttggttttttaaagtgttaggatggtaggtttgagttattatgtttggtagttttatttgtgttgatttttgaagttttttattttggttaatttggataggtttgttggggattttatttttttttggagattttgggatgtggttggatgtttaagtggttggggttttttatagtttttagttttttagggtgggaggtaggttgtgtttttggtgggtattgatagtgaggttgaaatgtttgtattttatatttttatatttaggggtattttgttgttgatttatttaaagtttttttaagttgtttaatttgttgtttagagggaaatgaaaagggagttattttttttgatttgtttgttttattaattttttaattaataaaaaagtgtattttgtttattggatgtaaataggtttattttttttaatatgttgaaatatagtgatttattagttattttattttatttggaagttgaaagtttaatggtgtttggtgagaattttttatttgagaagagttggtaataagttagtatgaatgtataggtggggtgtggttttgtgtgggtgtagaagtgtggtgttgggtgatgtatggaaatggggatttgtagtggttgggagtgtgaaggttgtggttatgatgttggtttattggtgattagtgtttattggggtttgtttttttttagaggttatatttttatagatttaaatttagggtttttgttaggttggattgtagatgttttgttagggatgtaggtaggggatttgaatgaggtgtaaattttttgttaaaggataagtatgtttttgtttaggtagttattgtttgttttttatagttgtagttgttgttgtttagtatggggggttatgtttggtattgtgagtttagggggtttggagtttgttagttttaaagatagtaagatgtttttttaggtgtttaggttagtgatgggtattttttgtttattttatttatttttttgggtttttttttttttagatgtagttagtgtgtgtgttttggtggggtggggtttttgtttttggttattttatgagtttgattgtattttttttttttgttgattttttttaaatatttagtattttttttttttagtattaggtggggaggaattagttgggttttggggttagttttgtttatagtattttttatggttatagtagtgttgggggatttgaggtttttatagtattttttatggatatggtagtgttggggggtttgaggtttttatagtattttttatggatatgatagtattgggagatttgaggttttggagtattttttatggatatggtagtgttgggggatttgaggttttagagtttagggttgtttatggaattgggtgttaattttttgggatttatatggtagaggttggtggggtagggaagttatgtgtaggtttttgaagtagatgttatttgtttttgattatgtttgtggttattttttgtaatttttgtgattttggttgtttttgattataggaggtttggtttgggtgtgggaatggttaggagtgtggtgagtttatgttttggggtatagttattatagtttggttatttttttatggtagggatagttttggggtgttgttttttggggtttgtttatagtggtgatttgtttattattgtttattggtatttattttttttttttatagtatttttttaatgatgggtgttttttggggttatttttaaattttttgtttgaagatttttgtttttgagttttttaggggtatttaatagagatttggttattttgttgttttttatgaggatatattggttgtaggtaggtgatagaggtgtttaggtgttatattgttgggtgttgatttttagatttagattatagaggttatagatatgtttttttggtttttatggttgggttttgggagggatatggtggatgttgatattattattgttgttgtttttggtttgggattagttttgggtttggttggttttgagttattttttagttgtatatagtgtttgttttgatttaattagtatttatggggtgattagaggttttgagagtttagttagtgggtgttaggaagggtgtgaggttttaaggagttagggttggagttgtagttgggatgattttgttagttatagtaaggatggtaggtagttggggtagttttttggtttaagtattattttagatttatttattttgtggtaggggttggtggggaaattgtggtttggaggttaggggttttgtttatagttattgtttgtgtgagttttttggggttgttataataaagagttatgaattgggagttaaagttatggaaatgtgatttttttagttttggggttgtaagtttgagattgaggtgtttgtagggttatattttttttgaagtttttaggggagggttttattgttttgtattgttagttatttgtggtgtttttgggttgtttttttttagtttttgtttttgatgttatgtgtttgatttttttttgttgttagtagtttttttataaggtgttggttgttgtttttgggattttttttgtttgattttattttaatttgattatttataaagattttatttttagtgtttgtaggtatttggggttagggttttgatatatgtttttggaggggtttaatttaatttattttattagtttttgagtgttggggtttgggatttaatttttttggttggttgtagtgattattgggatatatggtttattagttagtttttttttggggtttaggttttagttttatttatttttttatgaggattatttggggttttagagaagggagaggtagttgattgttggggagatggagttttgggggaggggtggtgtttatttttatttgttaggttgttgggttttatggagggggtatttgagatttttttttaagagttaggttttttttttttagtagagttaggttttgaggggtagttggagggtttaggtttgtgtttggttttagtagaattgtgtggtttgagtttgagaagtaatttatttgtatgttagttttgggagtttttttgttatttttggagatatttaagagttgttatttataattttattagggatggtggggttaggggtagttgttgattgttgtttttgtagggtggggttgtggtaatattatatttgtttagggtttgtgaatttgtttgtgttgtttgaggagtggttattgatggtattagatggaggttttttagtttttttttttgagttttggtagtgagagtgggtgttgaaattttattttgggttttaaaggatattggttgatttttgtgtagaaagttataggttttgttgtattttttttttgtggatgggtgtggatgtgttattatttgattgttttttgggagggttgggagttttatttgtttttgttttgttaaggtattgattggttggaggtgtggaatttggtttggttgttggtggtttgatttggggattggttttttgaggtttgttttgtttagttttgtttggggtatagggttttttaggttttgggttgtggtgtggggttgttagataaatgtagtaatggtagtaaggagaattggtatttttattgggttttttatgtttattatgtttgtttttttatgtggttttttgatttttgtgagggaggtgaggttgtattataggtgaggatgtgggggattaaggtaggggtattttttatttatttttagttatgtagttgattggggttgggttggggtttagatttaaagttgatgttggtgtttgtatttttggggtgttgtttttgttattaggatatggatggggtattattggtagttagtgggtggggtgggggatatggagtttggttttaggatttagaggttatttaggttttagtaaaggtaaatatgtattttttgtggggatatgtttttttggggtttgggttttatagaagaaatggtttgtaatggtgagtttatattttgagggattggtagatatggtattattttttaatttttaatgttttattttttttttaaagagatgaagttttgttttgttatttaggttggaatatagtggtataattatagtttattgtagttttggatttttaggtttaagttatttttttgttttagttttttaagtagttgggattataggtagtgttattaagtttaataaatgttttttgtttttttgtagaaagagttttattagtttgtttaggttgtttttagtttttgggtttaagtagtttatttgttttggttttttagagttttaagattatgggtgtgagttattgtatttagttaatagtattttaagaattagaaataataatagaataattaagagattataggttaggtgtggtggtgtatgtttgtaattttagtattttgggaggttgaggagggtagattatttgaggttaggagtttgagattagtttggttaataaggtgaaattttatgtttattaaaaatataaaaaattagtgggatatggtggtgggtgtttgtaattttagttatttgggaagttgaagtaggagaatggtttgaatttgggaggtggaggttgtagtgagttaagattatgttattgtattttagtttgggttatagagtgagaatttgttaaaaaaaaaaaaaaaagattatatatgagtttaaaatgattaaagagataaaagtagaaatgaaaaataatataatagtatgaaaaggatttagtagattagaaaaataattatataggatttttaatatgaggaatatggttgttggtataaaaattttagttgatggttttaatagtagattagatgtggttaaaagagaatatgggagttggaagatagttttgaggaagttatttagatgatgtttttttatatagtagtaggtaagagattgaaattaagttgtagaaaggttagtgtttttatattgaagatattttttaatttttgtttagaatattggaaaaatgaattgagatttagatttaataaagagggtgggagatattaggaaatatttatatattaaaaaaaaaataaaaaaaaatttttaattttaggttgagtgtagtggtttatgtttgtaattttagtattttttgtgaggttaaggtgggaggattatttgaggttaggagtttaagagattagtttggataatatagtgagattttaatttttataaaaaattaaaaaatttgtggggtatggtggtatatatttgtagttttagttattggggaggttgaggtgggaggattatttgagtttaggagtttgaggttgttttgaggtgtgatggtattattgtattttagtgtgggggatagagtgaggttttgttttaaaaatatgtttggtgtggtggtttatgtttgtaattttagtattttgggaggttgagataggtagattgtttgggttaggagtttaagattagtttgattaatatggtgaaattttatttttattgaaaatataaaaattagttaggtgtggtggtatgtgtttgtagttttagttatttgggaggttgaggtaggagagttttttgaatttgggaggtggagtttgtagtgagttgagattatattattgtattttagtttgggtaatagagtgagattttgtttgaaatataaaatttttttagttttgtgaagtgtgtaaagaggttttggaagtttgtagatgagatgtaggtataaagtttgtttttattttttgtttttagaatgttttggggattttggtgggtattggttagggtttgtgggggttttttggggtaggatgtagtttgggtgattgggttgaggtttttagttgattttggggggttttaggtaggttggggtagatgggagggtgggggttggggaggtagtagtttttttttttgtggtgtggttgtgatttttttttttttatatgaagtagttaggatgtggtagttgggggtttggggtttttatggggtaagtttaagtttagtgttggtttttttgggattttttatagtttttgttatgattatgttatgtggatatgggatttttggttgaagagataaatggtagtattgattaggggtaggtagaggttggatattgagtaggaagtgggggttgatgggagttgggattttgggtgggggaagggagggtttgttggtaaggttttttttattaggttgttttttgtgggttttgagtgttttttgattagttttttaggggtttttattttgggatttttatgttttttatgaattgaatttgtttggattttatgtttggtgatgtttttatttttttttttttagttttagggtggggggattttgttttgtttttgtttggattttgttgggggaattaaatagggggatggggtgtggggtagaagggatagtagtaggggtttagggttattttagaaagtgggggtttttggaggggattagtttttttgttatttggtgggtgatattggggtttttaggtataggttgtttattgtttagtgttggattttttagttttattatatttggttttttttttgattaggttttgattttggggatttttgaggaggggtttggatatgttggggggggggttgtagtagtttttattggatggtttttgtgtttgaattgtggtgttgggattgttggtttttggtgttttttggtgggtatagtgggttttgtgtgaggttgggtttggtgggtggttttgaggttggagtttagtgatagttatagtgggttttgaattggggttggggtagaggtagtgagagttggggtttttgtgttttatggtttggtagggatttgtttttagtagttttgttgtgtggttttggttggttagttagtttttttgagtttggtgtttttggtaatatggggttataatgatgttttttgtttattttgttaggtatttttaggaaagttttgttgtgggtttgtttttaggtttgaatttgttttttggggatttttggattggtaggttttgttttggtgtttttgatagttttgtttaggttaatttttttttggggatgggtattgttagttttatgggtttttagtgatagggataggagatagaaattttaggtagaaaaagatggggtttttgaggaattttatttttaagtttggaagtatagttttgagtgagaatatgtattttagtttttttgttttaatgttgttttttttaaaattattattgttttgttttatttttattttgtatttataaaaatttttgattttattggtagagaatagagtaggtaaggagaggagaagtagttggttattggagatggtagtttgatattagagaggagtagtgtgattttagagggatagttggatagtaggattttggagaagagtttggtagagatggtaggattttaggggattattattttttttttttattttttttttagtttttttttttattgagagttttttttattattttttttttttattttttttttagtttttgttttttgtgagagttttgtttattattttttttttttattttttttttagtttttttttttttgatagttttttttattattttttttttttattttttttttagttttttttttttttgagagttttttttattattttttttttttattttttttttagttttttttttttttgagagttttttttattattttttttttttatttttttttttaggtttttttttttttattggttataaaattttttgtatttattattttttaatttttttatgtaatttgatattttttggatgttggataagagtttgggatatagaaagttgttatattgattttttgtttttgagaaaaggtagagggtttattgagttgttaaatattttagatatttttggatagtaaagttaaaagtattgtaatatatattttttgaggttttatgggttataggtattgttttagatattgttataggattgtatggagttttgtttttgttgtgtttagaagtgtttattttagtttttgtatttgtttatttgtgtgtttttgttgttttgaggggttgagagttttgggttaagtaagatattgttgttattaggtttataaaggggttaaggaaaattttttgttttattggggtgtgtgtggtatggatgggagaggaggggtaatatagggttgtttttattaggttatttttttttttgtttttggggatttgttttagtgttgttttttaggtagatgggtttggggttagggatttttttaaagtaggtaatttttagtttggttattttttgattttgggttttatggttgggtttttaggtagggtttggttatttaaaagtagttttagtattttaattaatttttattttataaggttatagtttttatagtagttttagtatgttttggtttgttgttttttgagtatttttgataaatttttgttttgtaagattatagtttttatggtagttttgtttatttttttttggtttggagtttagggtttttgtaataggttggggtttatggagagtggtttgtatttggtgtgttggggtgtggttgttaatatttggggtgtagttttattaaagtagggtgtttgtagtggtttttatattattatggggtgggtttttttgaggtttttttgttttatttttttttgtttttagaagtgttgagtttgagtgttttggggttttgttttgaatatattgtgtgtttttttttttttagttggtttttagagatttttggtagggtttgatttttaggattatggttgtaagtaattttttggttttttttttttttttagttttgtaaattagttttttgattaaggagatttttagaattgttttttgattttgtaatttgagaggattatattattgtgtagtttttattttgggttttggttttttgagttttaggattttgtattagggtttgaagaattaggtggagtatggttggtgttggttattggggggtatatgtgtagtttttaaggtttttagtagtgttggtgtttggtgtttagttttgttaggtttaggtttgaggataggggttgggggttttatgtggggttttttttgttttgtggtgagggtttttttatgttaagattgaaatttttggtttttaggttaagatttagggtttagaattagtttagttgatttttttggtttggttgtagggtttagggaagttggattttgggggtgggattgggatttttttgttttttttagttttatttattttttgttggttttgttgttggtgagtggttagtttggttgttttatattttttagtagttggtgggtgatttttttggtagtaggatttgtttggttgggttggttatatttgttgtagtagttggtttaaaatttttaaattttggtaagttgtttgtttggttttgtattggttaggttagtgtatttttggtttgtagggtttgtttgttttttgttgaattggttgttggggattgtggttaggtgggtaggtggatagtattttagtttggagatattagggttgtttatatgttaggttgtattgttttagttttttgtgtgtgtgggtgggggtggtattttgtttgggttttgttggagtaatttagatgagagtttgtaggttttttaggagaaagaaaaatagagatatgggtgttggggtttgatttttattttatttttttgggtaggggagaaagtagggtgttatttttttgagggtaggtggttgttggataggtttagtttttttgttttggttagtttgttttaggtttgttaatttttttagtgtttatttttggtttatttttattgggatttttgggttagtggtagtttgggtaggttaggagggtgtgtaggttaggagggtgtgtaggttaggagggtgtgtaggttaggagggtgggtagtattaggagggtgggtaggattaggaggagtggggtttagttgttataggggttttttaagttgttatttaattttggtttgagtttgttatttgatatttggttatttggttgtttttaggttttgggggaggttgggtttttggttgttggatgttgggagttagagttttaggagtagagaggtggtggttgttgtttatttagggtttaggtgggggtgttgttaaggtaggtggtgaaattgtagttagtgtttttttttgtgggtgtttgtttatttttgttttttggtatttgttgagtatttattgtgtgttgttggtttttttgtgttgagatagatttagtaaggggtttgtggaaattgttttgtgtttagtatgtggtttttttttggttttttattgtttgtgtgtgggggttttttaagtatgtatttttttgggattttgttttgtttagtttgtatttgttgggtgtaggtggggttttttgttttgtttggggttagtgggaggggttggggtggttgtggttattaagtaggtattttgaggggagagtttgggtagtattagatggtgatattttggggttagtgttttgtatttagtaagatagtagtttttgtggagtgttgagtggatagaggtgggggttggtttgttttgtgtttaaggttgggtgggagagtattgtagttttggtttattttagttgtttattttagtttggtgtttattttttgaaagttttttttgttggtatttgtagttgaggtaattgatttttggtgggggttgggttggtttgggttttggttttttttggtttttgagtttttggtttagttgttgttgaggaggttgtgtttgtttttggggttaatagttgtaggtttggaagtgttttttttttatattttttagagtaggtgtgttttttatagtttaatttagtttgttaaggatgggttttagggatatgggggttttttgtttttttttgtttaattttttggggtttgggttgggattgttgttggagtttttagttttgtgggtagtagatgttaagtttttggtggttagtttgtggttaagtgggttgagtatttattgtagttttgattaagagtagttgtgttttttagttatgtttattagatttaaagtgtatggttgggtatatatttttttatttgttttattgtttaggtttggtgggggtttttttgatgttatttttttttttttaggttttgatatttatattgtttttattgatttgagagtttgtgttatagtgtttttagtgtggtaggagagggatgtttgagttatggtagttattggtgattttgtgttagttgggtgatagttgaattttaggttagtttttggtagtttatttgtagtgtttttggtgggtatttagttttgtttggtttaattttatgttatgttatgaggttgattaattttttagtagttggtggttatagtggagggtgtttgagattttaaattggggatttattttgtggatatttttttttttttattatagttgtgggtattatgtttttttttttgtttttttttgtttatgggttttgatattttttttttgttttgttttttttgttgtttgttggatttattattgtttttagtttttgagtttttttttggttttggaattttttttagtttgttattagggtttagtatatttgttttagggatggggtgtagtttttattttgattagattttggtataggagattttaggttagggatttttttagggaagtaattggagtttttgttttatggtggaggggttaggttttgggggatttgttaggggtaagtgttagttagattgtgtgtttgggatagttgttttgttatagttggtttttgttttgggttgaatggtgttttttagatttatatttatttagaattttagtgtgtgattttatatggagatggtatttttgtaaatttatttatttatttattgagatggagttttattttgttgttttggttggagtgtaatggtgttattttagtttattgtaatttttgttttttaggtttaattgatttttttgttttagttttttgagtagttgggattataggtgtttgttattatgtttggttattttttgtatttttagtagagatagggttttgttatgttggttgggttggttttgaatttttgattttaggtgatttgtttgttttagttttttaaagtgttgggattataggtatgagttattgagtttggttatttttgtaaatttaattagttaagatgaggttatgtaggattatggtgaaagggtttttgtgagaaaaggaaaagaggagaatgggtagggtttttagggaggtgttgggtttggggatgttagggtttagggggttaataggttttggttatgtttttatggtagagttagagaagatgatgaggttatggtttttgtatttttaatatttaaatttttgtttttatgtttagattttggggggttgatttttggtgtagagaggtgtttttttaggaaagtgtagagggggttggtgtggtttttaggtgtggggagggtggtatatttgagatgtggatgtaggatttagagtgggagttttggggaagtaggaagatttttgttttttttggggtagggttgtttattggttaggtggtttgggtatagaagtgggtgggtttggtgggttttgatgtaaagggttggagggagtgtagggtttgattagtgatgtttgttttgggtatatggaggagtggggttttatgtgttatggttagttgagagggagaaggttttgttgggaaatttttaaaggttttttgtagttagtttgagttgaggttgtataggggttttagagttagtattaggttagttttagatgttgggattagaaggggttgtagggtttggtttttaagatttgtgttttttattgatggtttggtagttgggaaagagaagggagaaattttttttttaatttttttagtttggtttttttttgattttagggatagagttttgggttagatgtgaattagtggttttattaaattttttatatttgagtttgtgattttttttgtttattttgtattagatttattagttatttttgttttagtgatggatattttgttgatattgggttttggggtttttgtgaagtgttaagtggttttgtgtaggtgatttatttgggtttattttttttagggtttttaagtatttgatgattttatttggatggagtattttgtaggttgtttgtattttttattttaggaattttttatttttgagagtgatgggagaggtggatgtttattttattgtttttttttgtgtaggagtttaataatttagtagttgggttgaggtggtgatgtgtagggttgtttgtgtttttggaattttttttttttttaggttttatgtgtatgtgttggttggttgtggattgtgtttttttttgaaagaagtggttttgttattaagtttagtgttttgtttagattgttttattagtttttgttgttgggtttagttgtttggggatagtggttgtttttgttgggttggttttgaaatgtttgtttgaggtttagtttaggtgtttaggttagtgtttggggtagggtatttttagataaagtttgagtttatgttggttttataggtattttatttgttttaggggttgatttttggttggttgttatagttttttggttagtgaggtttattttggttagttggtattttaaggttttgaagaagagtgagtatttgttaagtattgattgtttgttgtttgtggatttgttttttttttaaatgggatgtttttggttttttttttgtagagggtgaggtgttgagagttggtgtttatttattaagttttggtgtatttttaggttttagatggtgttgaaggtattgtttggaggtattgttttgttttttgtattattttgggggtgaaggtgtgtgtgttttattttttaggtgaggaaaatgaggtttggggagttgagtgtttgtttgtaggtttagagatggtagtttggtttatggtagtttggttgttattgggaattatggttttgttttgttttgttttgttttgtattttttttgagagttttgggttttttttggtgttgggtaggtttgttattttttagtagtagttttagtagaagagtagagtttttattgggtttttttagggttgtttttaggggtaggatttgagtttttaggggtttttggggggttatttttttagttgtgttttttttttgtaggatggggataggggtttagtatagtatttagtgggaggttgttttgatagtttagggtatggtagggtttttatatgtatgggttgtagggtggttgtttttagagttgttgggttaggtagagatgaaggggtagtgaggttagtttttgagggtgggggtggttattgtttatgtttttattggtttttttttttgttatttgaggtggttggagatttggggataagtgtttgagttttttgttttattgattatagtgttttttagtggtt

SEQ ID NO: 261 - DNA, 4419 bp, Artificial Sequence
  chemically treated genomic DNA (Homo sapiens)
tgtgttgtgtgggtagggagtagttttttttggttgttgaggtgtttttaatttggttggagagataagtgtattataagaaatagaggtagttaagtgtttgggttattattaagtaaggttgaaaaggggagggtaggtagattgggatttgtgggtgttaattaatgttatggtggtggagagtaaaggggatgaatatagtttggggttatttttggagttttttagtgtttgtttgtggttgtgtttggttggttgtggattttggtgggtgttgtaaagtggtgggattgttagtgtagagttttggttttttgttttgtttttgggtttgagtattggagtttttggtgtttgtggggagaagttttggattgagaaatatgggagggttttgttagtggttgtaggtgtggtagttattttggggatttagtgagaatggggttgtttggttttgtgtgaattttttatgtgggtgtagtttttgagttgttgagggaggtggtggtaatgttgtttagtgttagtagagggtagttttgaggttgtgagtttgaatggtgattttgttaaattgtgggtttttttttagtttttggattttgtggggtagaggtggttttggagtttagagattagtgattttagtttgtaggagtttggtgtagaggtttaagggtatttttgggatgtggttaagttatagtttttaggtagttttattttgtgatggtaagggtttagagggtggagggggattagatgttttaggaggggttagaaagttaatgtatatagggaatttgtttttaagtaatagattttaagtatgtggaaattttttaaatgatgttggtgagagttatgatagtttttgtatttttggtgagggaagttggaggttagtagtgggatggtttttgggtgtgtgggagatagagggattagtgatttttgttgggggtagagggattgtggattaaggatttagatatatttaattggggattttagttttgattgtggttatttaattggtgttgaatttgagtaatttattatattgttttagtttttgattaattatttttgtaaaatgggtattgtgggttttgagttttgtaagggtgttagggatttgagatagtaggaatttttttattgttttagtaattttgggtttttgggtttgtaggtgggttgaaaggatttttttattgtatgtttgtttggtgtggttgttttagagattgaggtttgttaggttttgtaatttagttgtgtgtggttagttatggttttggaattgttgggattgttttagtggtattttggttagtttttgattttttgttttgggtattagggttatttagttttagaagatagtgtttattagtataggaattgagattttatatttggtgtagtgggttttttaggaagtttggtgaagagttaaggtttgttggatttgaggttgtttggggtgttaaatagatttatttatgagtatatttggttaatatatttaagtttaatagtgggtgggatttttggttggttttgattttttttatagtgtgtgtaaatgggtatttattagattttttttgtttgtttttttatttgtaaattttgaaaggagagtattttttggggtgattttgaaaattatgttagaattgaaaaggtttgtgtaaatgtgaggtgtaatgatgatttattagaagtagttagttttgtatgtgtttgtaggatagatgttagaatgttttataaatgtgtgtatatatatattatgtatgtgtgaaggtgtatatttgtttttagatatttgataaatgtatatatgtatgtgtgtatttttggttgagagtaaaggggttaatatagggtttatataggatattattttgtagttttgtgtgtgtatagtatatatgtgagtatgattgtttgtgtttggagatattgtatggtattggaggagttgtttagttgttggtgttatttgggaagtagggttttgggtgttgttttggagtgtgggaaagtttggatttgggtttgttggttagtgttttggtgttgttgggtttttttattttttatttgttggttggtgagtggttttagttttaagatttttgattttgttggtgaggggagggagtgagaaggagtgtgttttgggtttaagaggttgtagggttttattttttaggtttgttgttttttttttatttttttaggttatatttttatttaaaataaagaagggtgtttgatttatttaggttagggaagttggtttttgggagttttttgtttttataagttatggtgaagggaggtgaagttagggtttgttatggtttgggagaaaatgtggttgtagggtttttttgggttgtagtgttggtttggggttttaagattgttaaggtgtgtgtgggaggtgtgtagtgtggttattgaagagttttttattattgtattggtaggttgttgggtttgttttttttttatgtttttaagggttttgagttgtgtagtatttgtattatttagaagtgtttgtggagaaaatgattttaggtgtaagtttaaggttgttgtttgtaaaggtaatgttgtggagattgggttttatagtgatttgggtttttaagttattgaaagttatagggtagggttataaatatttttttgttttttttgtagaattgtgtggttgataggagagtgttgtgtagaaaatttgaggttgggtgttggaggagtttttgtggtttggagaaggtatagaggtgtttttgagaggtgtagttggaataggtgatgtatgggtttggatttggttggttaattgagtttagtggttgtgaaaattagagttgttatagaggttgagtatgattttatttttggggattgggtttggtggggagttattgtttttaatgtttttagagattttaagtaggataatataatgttggtaggagtaaggtgtaaggaatttagtggtagaagttttttgggggggtggggaaaggtagatttgtgttttgtttgagtttgggggtggggatagtttttggttttgtagtttttgttttggggattagttgggtttatttaatttttttatatggggttgaaaggggttaatgggatggttttgttgttttttttttgggattttatagggttttgatttggtttttatttttgtatggttagtagttgtgggggttttaggaaggaggataaaggtttggtgttattgtgggtgggggtttggttttttggttttttgtttatatttatagtttttagtggttgttgggggaagatttttaaaaatatgtgttgaatttttttttttttttttttagaaataaataaataaaaaaggtaaaaggtgaatttttttttattttttgtttatagagattaaagttttttgggattttgttttttttttttttttgattgtttagaaatatttgtttttttttgtatatagaggaaaatgtggggaaaggttttttaaaatttggttttatattattattattattaaggataattgggtaggttgaggttttaatgtggatgatttgagttggttttgtgttggggttttgtagttattgttttgtgtgtttagtatttttgggggtgattagggtttttgtgtttttgtttgttgtttggtagttgagagtattttgtgtttagattggttgatttatttttttttgaattttgtttagagttggtaagggggatttagtttgtgttttaagatttgggtttgtagtgttgttaataggtttggggatatgaggtgttttaggttggggtttttttggttgttggttttttttgttttttatttgttggtggtgttttggttgtttgtaattgatttaatttgttttttgtgtttgttttttaggttttttgtttttttataaaggtttaggggagttttgtttataggttgattttgtaatttttggtttggtggttattttttgtttttttgaaaaagaaaaggaaaaaaaaaaaaaaaaagaaaaaattaattagttgagggaggtgtgtgaggattggaggtgttagttggatagtttatgagtaggtttttgggttggtgttgttttgtgggttagtatggttttttttagagaaaattttttaaatgtgtgaagattgttttgggggaagtgagagggaggttggaggagttttgggtggggttttagtgtttattagttgtgtttttagggtttgggtgtttgttgtaatggtaattgtgtgagttttatttttatggttaaggggttagggtagggtggatgtaattgtgtgtgtttggttttggaaggtgtttgtagg

SEQ ID NO: 262 - DNA, 4419 bp, Artificial Sequence
  chemically treated genomic DNA (Homo sapiens)
tttgtgagtattttttggggttaggtgtatgtgattgtatttattttgttttagttttttggttgtgggagtgaggtttatgtggttgttgttgtagtgaatatttaagttttgaaggtatagttggtgggtgttgagattttgtttggggtttttttaattttttttttgttttttttaaagtggtttttatatgtttaggaggttttttttgagaaaggttgtgttgatttgtgaagtggtattgatttagggatttatttataggttgtttggttggtgtttttagtttttatgtgttttttttgattggttgatttttttttttttttttttttttttttttttttttttagaaaagtagaaggtagttattgggttagaggttgtagggttagtttgtgggtgaggtttttttaggtttttgtggagaaatgggaaatttgaggggtaaatgtaggaagtgggttgggttaattgtgggtgattgaggtgttgttagtgggtggggagtgagaggggttagtagttgggaagattttggtttggagtgttttgtgtttttgggtttgttggtggtgttgtaagtttaggttttggggtgtgagttaagttttttttgttagttttaaataaaatttgggggagaatgagttggttagtttgggtatagggtgtttttgattgttgggtggtgggtggaagtgtaggggttttgattgtttttagaggtgttgagtgtatagggtagtggttgtagagttttggtgtgaggttaatttggattatttatgttgggattttagtttgtttggttgtttttagtaataataatagtatgaaattgagttttaaaaaatttttttttgtatttttttttatgtataagggagaataagtatttttaggtagttaaagaaaaaaaaagggtaggattttaggaaattttaatttttatggatgaggagtgaaggggaatttgttttttgttttttttgtttgtttgtttttagaagagaaaaaaaggaaatttgatatatatttttaaaaatttttttttaataattgttaaaggttgtgagtgtgagtagagagttaggaaattgagtttttgtttgtggtgatattgggtttttgtttttttttttgaagtttttgtgattgttgattgtgtagagataaaggttgggttagggttttgtggaattttgagggaggggtggtggggttgttttattggttttttttaattttatgtaggggggttaggtgggtttagttgatttttggaataggggttataaggttaggggttgtttttatttttaggtttagatgaggtatggatttgtttttttttatttttttgaaaggtttttgttgttaaattttttgtattttgtttttattagtattatattgttttatttaaagtttttggaggtgttagggatagtggttttttattggatttgatttttagaaatggaattgtgtttaatttttgtggtgattttggtttttgtgattgttgggtttggttggttggttagatttgaatttgtgtattgtttgttttagttgtgttttttaggggtgtttttgtgttttttttgggttgtggagatttttttagtgtttggttttgaattttttgtgtaatgtttttttgttagttgtatggttttgtagagaaggtgggagagtgtttgtgattttgttttgtagtttttggtgatttaaaaatttaggttgttgtggaatttagtttttatggtattgtttttgtaggtagtagttttgggtttatatttgaggttgttttttttatagatatttttgggtgatgtgagtgttgtgtagtttagaatttttggaagtatgagaggaggatgagtttggtggtttgttggtgtggtgatggagggttttttggtagttatattgtgtgttttttatatatattttaatagttttggggttttgggttagtgttgtagtttaaagagattttgtagttgtatttttttttaggttgtggtaaattttggttttgtttttttttattatggtttgtgagggtaggaggtttttgggggttgatttttttgatttgaatgagttaggtatttttttttattttaagtgggggtgtgatttgaggagataaaggaaggatgatagatttggggagtggggttttgtagttttttgggtttggagtgtatttttttttgttttttttttttattggtaggattgggggttttgaaattggagttgtttattggttggtggatgagagataaaggagtttggtggtgttgaagtgttgattagtagatttggatttggatttttttgtgttttagagtagtatttgaaattttattttttaggtggtattgatggttgagtagtttttttggtgttatatggtgtttttaggtatagatagttgtgtttgtgtgtgtattgtgtatgtataagattgtaggatgatgttttgtatgagttttgtattagtttttttgtttttagttagaggtatatgtatatgtgtgtgtatttgttaagtgtttagggataggtgtgtatttttatatatatgtgatgtgtatgtgtatatatttgtagaatgttttagtatttattttataggtatgtatagggttggttgtttttaataagttattattatattttgtatttatataggtttttttagttttggtatgatttttagaattattttgggaaatattttttttttaaagtttatagatgaggaaataagtaaaaagaatttaatgggtatttgtttgtatatattgtgagagagattgaggttagttaaagattttgtttattgttgaatttgggtgtgttggttgaatgtgtttatagatgggtttgtttagtgttttaggtgattttaggtttggtgggttttggttttttgttaggttttttgggagatttattgtgttgggtgtggggttttaatttttgtgttgataagtattattttttggagttgggtgattttagtgtttagggtgggaagttgggagttggttggagtgttgttgaggtgattttggtggttttaaggttatggttgattatgtgtaattgggttgtaaagtttggtgggttttggtttttaaagtagttatgttaggtaaatgtgtgatgaaaggatttttttagtttatttataaatttaggaatttagggttgttggagtagtgaggaaatttttgttgttttgaatttttagtgtttttatgagatttggagtttataatgtttattttatagaagtgattagttggaggttagagtggtatagtgagttgtttaagtttaatgttagttgagtggttatagttgggattggaatttttaattaagtgtgtttggatttttggtttatagtttttttgtttttagtaaggattgttggtttttttgttttttgtgtgtttaggagttattttgttattagtttttgattttttttgttaagaatgtgaaaattattatagtttttattagtattatttaaaaggtttttatatgtttggaatttgttgtttgaaaataaattttttgtgtgtgttggttttttaattttttttaaggtatttggtttttttttattttttaagtttttgttgttgtagagtgaggttgtttaagggttgtagtttgattatattttgggggtgtttttgggtttttgtgttgggtttttgtagattgaggttgttggtttttgggttttaaggttgtttttattttgtagaatttgggagttggaagggagtttgtggtttggtgaggttgttgtttgggtttatggttttgaggttgttttttgttggtattgggtgatattattattgttttttttggtggtttaggagttgtatttatgtgaggggtttgtgtagagttaggtgattttatttttattgggtttttagagtggttgttgtatttgtagttattgatgagatttttttgtattttttaatttgagatttttttttgtagatattagaggttttggtgtttggatttagggataaggtagagagttggagttttgtgttggtaattttgttgttttgtggtgtttgttgggatttgtggttaattaggtatggttataggtggatgttgggggattttggggatggttttaggttgtgtttgttttttttattttttgttattatagtattgattggtgtttatgggttttgatttatttgtttttttttttttaattttatttgatggtggtttaggtgtttggttgtttttgttttttgtagtgtatttgtttttttaattaaattaagagtgttttgatgattggaaggggttgttttttatttgtatggtata

SEQ ID NO: 263 - DNA, 1918 bp, Artificial Sequence
  chemically treated genomic DNA (Homo sapiens)
tattggatatgattattgtatataatatagaagatattaagggttaagtaatgatgtataaatggggtttattgtttaaatttatagaaagtaaaatgtggaaaattagtaattttaattgatagtgtatatttaaagaatttatattggttgggtgtggtggtttatgtttgtaattttagtattttgggaggttgaggtgggaggattatttgaggttaagagattgagattagtttgattaatatggtgaaattttgtttttattgaaaatataaaaaaattagttaggtgtggtggtatatgtttgtagttttagttatttgggagggtgaggtaggagaattgtttgaatttaggagatagaggttgtagtgagttgagattgtgttattgtatttgtttgggagatagagtgagattttgttttaaaataaaaaataaataaaaagaatttatttaatagaattaagtattaatataataaatatgaagaattttagatttttggtttttaaaaaatatataaagatgatatttttttaaaatatttttataaaatatattgagattgtgatgttttatattgattgtatgaaaataatgaaaaagaattagtattgttttattataaaagttttattaatgtaaatttataaatttttttttaaatattttgagttaattttaattttatgatagaaatttattatttttagtaaaaatagttggtatttgggaaattaaaggtttaaaaattaagaatagtaattaaagaaatttgataaaatagtttttttaaaatttttatttatattataaggggaaattttgattatgtttttttttttttattaattgtagaatttaatattaaggattatataattttatatttttttttgagaaaaagtaaaggttttgtgttgtagtaataatgtaagatatggagggaagttttatttaagatttttttgtttgttttttttttaaagttattttagaatattagggagggttgagaggtaaggtatgaagggtgtaatatttaatatgagtaatgtgtgtgatgtatttggttaaaatgtatatagaggatttgtttttgtttttagatagaagttttttgttttgtagttatgagggttaattgttgaggttttatagttttttttttttttatatttggattgttatgttttttatttattattttgatgtagaggtagatttaggatttttgtatttgttaaggattttttggtaagtttatggggtgggagtggttataagatggagtttgtttggttttggtttttttggtttatataagtttgttttttttttaatttttaatttttatagttttttatttttttatttttgatttattttgtgttattgatgtttttggtttttgtttgtagtaagtttatttttattattattttttgtataaaagtttgtatttattaggttaaagaggggaattaatgtttgtaggaattgttttattgaattgtttggttgtgttttttgttagattttatttgttgttgtggattgtatataattatttttggtatgttttgtgtatgtattattttttttattttgttttttttttgtttaaatatgtgatttttttttgtttttgtttatgtttatttttgtttttttatttttttttaggaaggaggagggagttgggggtgttaaaagtgtagtgattttttttttttttttgtttttgtttttgtattttttgttataatgttttttgggttgttagtgttttgatgttttttgggaaaatagtttatttttttttttttttttttttttgtttttaattaattagttatttgttagagagggatatgtgtagtgagtgttttttgttttttttatttgaatt

SEQ ID NO: 264 - DNA, 1918 bp, Artificial Sequence
  chemically treated genomic DNA (Homo sapiens)
ggtttgggtagaagagatgggaggtatttattgtgtatgtttttttttgatgggtggttggttggttgaaggtaggaggagggggaggggaggaaatgagttatttttttagaaggtgttgaggtgttagtgatttggaagatattgtagtgggaggtataggagtgggggtggggaggaggaggaagttgttatgtttttaatatttttagttttttttttttttttaagggaaagtggaggaatggaagtgggtgtggatggagatgaaaggaggttatgtgtttgggtgggagaggggtggggtgggagaggtagtgtgtgtgtggggtatgttgggagtggttgtgtatggtttgtagtggtaggtgaagtttagtagaggatgtggttaggtgatttggtgaagtgatttttgtaggtgttggtttttttttttgatttggtaaatgtaggtttttatgtgagaggtaatggtgggggtaaatttgttgtaaatgaaggttaggggtgttggtggtgtaaggtgaattgaaagtgggaggatggaaggttgtggagattgggaattgggaagggggtaggtttgtataggttgggaaggttaggattaggtgagttttgttttgtggttatttttgttttgtgagtttgttgaggaatttttgataagtgtagggattttgagtttatttttgtattggggtagtaggtgaggagtgtgatggtttgagtgtaagagagaagggaattgtgaagttttagtaattgatttttatgattgtaggatggaggatttttatttagggatagagataagttttttgtatgtattttgattagatgtattatatgtgttgtttatattggatattgtgttttttatgttttattttttaattttttttggtattttggagtggttttggggaaggagtaggtagggaagttttgagtggagtttttttttatgttttgtgttgttgttataatataaagtttttgtttttttttggagagggatgtgggattgtgtagtttttaatgttgagttttatgattgatgaaggagaagggatgtgattaaagtttttttttatagtgtagatgagagttttaaaaggattgttttgttaagtttttttggttattatttttagtttttgagtttttggttttttaaatgttagttgtttttgttgaaaataatgaatttttattataaaattagaattaatttaaaatatttaagaaaggatttataaatttatattagtaaagtttttatagtgaaatagtgttggtttttttttattgtttttatataattaatataaagtattatagttttaatatgttttgtaaagatattttgaaggaatattatttttgtatgttttttaaaaattaagaatttaaaattttttgtatttattatgttggtatttaattttgttgggtgggttttttttgtttgttttttgttttgagatggagttttgttttgttttttagatgagtgtagtggtgtgattttggtttattgtaatttttgttttttgggtttaagtagtttttttgttttatttttttgagtagttgaaattataggtatgtgttattatgtttggttaatttttttgtgtttttagtagggatggggttttattatgttggttaggttggttttgattttttgattttaaatgatttttttgttttggttttttaaagtgttgggattataggtgtgagttattgtgtttggttggtgtaggttttttaggtgtatattattagttaaagttattaattttttatgttttgttttttgtaagtttgggtagtggattttgtttatgtattattgtttagtttttagtattttttgtattgtgtatggtaattatgtttgatg

SEQ ID NO: 265 - DNA, 13670 bp, Artificial Sequence
  chemically treated genomic DNA (Homo sapiens)
agtgttgggattatatgagtgagttattatgtttggtttgggtttttgtttgtttgtttttaagatatggttttgttttgtttttaggttggagtgtagtggtatgattatagtttattgtagttttgattttataagtttaagtgatttttttattttagttttttgaggagttaggattataggtatatgtttttatgtttagtagttaaatttttttttttttttttaagagataaggggttttgtaatgtttttaaggttggttttaaaatttttggtttgttgtgattttttttttttggttttttaaagtgttgggattgaaggtatgaattattatgtttgttttttagtagtttgtgatgttaggaattatatttttattttttgatgttttttttttttttattgttggggtattatttttgtttggtttattttttatttttttttttttttttttttttgagatggagtttagttttgttatttaggttgtagtgtagtggtgtgattttggtttattataatttttattttttgggtttaagtgatttttttgttttagttttttgagtagttgggattataggtgtttattattatgtttggttaatatttgtatttttagtagagatggggttttgttgtgttggataggtttgttttaaatttttgattttgtgttttttttgttttggttttttaaagtgttgggattataggtgtgagttattgtgtttagattttttttttgagatggagttttttttttttgtttaggttggagtgtagtggtatgattttggtttattgtaatttttgttttttgggtttaagtgatttttttgttttagttttttgagtagttgggattataggtatgtgttattatgtttggttaattttttgtaattttggtagaggtggggttttattatgttagttaggatggttttgattttttgattttgtgatttgtttgttttggttttttaaagtgttgggattataggtgtgagttattgtgtttggttttattttttatttttgtggttttttttttttgtttgtttttgaggtgttgggggtttttagggtttagtttttagttttgttttttattttgttttagggagattttatttttgtttttagtttaagagtttttttgttttataatatattgatgtttgttgggttatttttgtttttagtttataatatgtttttaagtttttattttgggatttagtgttgttagattgaatatattttaaatttgtttttgtatttttttagtgtatttgttttttttttagtgtttggatttgagttttgttttttattgtttggattatgtttatttttttttgaggtttttttgttttttggtttggtttttttattattttttaagtaatattttagatatatggatttgtttgagatttttttttgttggtatgtgaagttttttatagttttatgtttttttagtttaaattttttttttagttttatggaaatgttaaattattttggtgtgggaggtttttgtgggttggggtgtagttttgtaaggtttagttttaagattgttttttttagggagttttttttttttttttttaggtaagtgtttttttttagttgtttattttattagggtttgattatattttgttggtagtgttagagtttggttttgttttttattattttttttagaattggtggtagggatagatgaatggatgaatgaatgaatgggaagtgagaattttattattggattattaatgtagtttttggaatgagtgagtgagtgagtgagtgagtgagtgagtgatggaaagtggtttggaggtagggagagggataggttgattatgtgaggaattttagtttaagtttttgaggtttttgtttttgttttaaaagatgtatgtgttaagtttttgggttagaaaaaaaaaaaaaaaatgggttgggattggtttaggttgggggaggtgggtttatgatgagatatgattttttattggtttatttgttaggattttgtttaattgatgtgattgttttttttagaagatttttgttttttttttgttggtggttgtggaggtggaagaaggtgtttttttgttgttttagtaattgttagtggatttttgttgtttgggtaattgttttaggttttttgttagtttttgtttgggtttttttggttatttggataattgttatttgttttggttaattattaatttgttttttgttattttggtaattattgttggatttatttatttttggatgttgttttggttttgtttgtaggtttttttgttttaaatttttgttgtgggttttgatgtttgtgattttatgttttaggggtttttttttttttttgtttgtttttttgtttttttggggtggggggtattgttttttttttggtaggggggttttgggttggatttggttttgggggtttttgtttggttgggatagtgggattgttttgtgttgtggttgtgtgtagttttttgtaggttttggtgtttgtatttttgtgtgggattgtttaattgttatagggagttttttaaaatgtaagttatgttttttttttgttgaaaatttttttttggttttttttgagaattgaatttaagttttttgtagtttttggtgatttggttgtgtggttttttttttgaagtttttttgtttattttgttttagtaaggttttggtttgtgtgttgtaattttaatgatttaagtttttttttgtttgggatttttttagttattattttttattttattaaaaagtgtattttagatgggtgtggtggtttatgtttggaattttagtattttgggaggttgaggtgggaggattatttgagttgaggagtttgagattattttgggtagtatagtgagatgtttgtttttataaaaaatttttgggaggttgaggtaggtggattgtttgaggttaggtgttggagattagtttggttaatatggtgaaattttgtttttgttaaaattataaaaattagttaggtgtggtggtgtgtgtttgtaattttagttattggggaggttgaggtaggagaattatttgaatttaggaggtggaagttgtagtgagttgagatggtgttattgtatttttgtttgggtaatagagtaagtttttatttttaaaaaaaaaattaaaaattagtttggtatggtggtgtgtttttatagttttagttatttaggaagttgaagtaggaggattgattgagtttaggaggtagaggttgttgtgagtttatgttatattattgtattttagtttgggtaatagagtgagattttgttttaaaataataataaataagtgtattttttagttagggttttatttgtgagtttttagtgaagttttttttgagttttgttagtttttttttttttaaattttttttggtttatattttgttattaggatttagaatattgtttggtatttatgttgagtaaaaagatgttgtgttaggtgtagtggtttatgtttgtagttttagtattttgggaggttgaggtgggtggataatgaggttaggaatttgagattagtttggttaatatggtgaaattttatttttattaaaaatataaaaatgggttaggtgtggtggtttatgtttgtagttttagtattttgggaggttgagatgggtgaattatgaggttaggagattgagattattttggttaatatggtgaaattttgtttttattaaaaatataaaaaattagttgggtgtggtggtgggtgtttgtagttttagttatttgggaggttgaggtaggaaaatggtgtgaatttgggaggtggagtttgtagtgagttgagattgtattattgtattttattttgggatagagtgagattttgttttaaaaaaaaaaaaaaaaaaaaaaaatataaaaatgagttgggtgtggtggtggatatttgtaattttagttgtttaggaggtagagataggagaattgtttgagtttgggagggggttgtagtgagttgagattgtgtaattgtattttagtttgggtgatagagtaagattttattttataaataaataaataaaaaaaggatattgtgttggggataagggaggatagagggggatgattagtaggtaggtttattttagagataggagaatgtattttttagggttttttagtttttatggtataggtgatgatggtaatatttttaaaaagttaggtataagttagggagatataagttgatgttatggttagtttgagattgggtggtgtattttttatatataattgttattttttatttatttttattttagagggttttagagttagtggaaattgtggttaatttggagtagaagtttttaggagttggagaggtaggttttagattttagatggtttttttgggagttggtttttttttgtttggaatttagaattttatttgttttaatagagatgagagttgtttttttagggatttgagataggttagtttaggttggggtaagagaatttgatttgattaggtttggggttatgatggggggtgagggaaggggtttgtgggagtttttttgggattggttggagaggaatgaggaatttgtatatttatttgtttgtttatgagggtttgtttttggggaggttgttaggggttaggtagggaggttttttgttttttttttttttttttgagatggagttttgttttgttgttaggttagagtgtagtggtgtgattttagtttattgtaagttttattttttgggtttatgttatttttttgttttagttttttgagtagttaggattataggtgtttattattatgtttggttaattttttgtatttttagtagagatagtattttattaggttagttaggatggttttgattttttgattttgtgatttgtttattttagttttttaaagtgttgggattataggtttgagttattgtggttggttttgatttttatttttaagttaggattatttttattagtgttgttatatataattttttttattgatgtggtaattgagtatttgaaatatagttggtatggttaggtatagtggtttatgtttgtaattttagtattgtgggaggttaaggtgggtagattatttgaggttagtagtttgagattagtttggttaatatggtgaaattttatttttattgaaaatattaaaattagttaggtttggtgatgtttttgtagttttagttatttgggaagttgaggtataagaattgtttgaatttggtaggtggaggttgtagtgagtttagattgtgtttattgtattttatttagtttgggtgatatagtaagattttgttttaaggggaaaaaaatgaaatatagttggtgggattgagtattgtatttttattgtattttattttaattaatatatatttaagttgaagtagttaaatgtggttagtagtattgtatttagagtagtattgagttgaagatttaggtaggaggttgaaggtagggataggaaggttagggtttaaggtttgtgtagttatggtagagaagtgattttggtaaagtgtagagtgaggttttaggaagggaggaggtgggatatttggttttggtatttggttttattggaagagaggtatatttagtttttagggttaaagtgtttgttatatatatatgtatttatgtttgtgtgtgagtataggggttggtgtgttttgaggtatttataggtgtgtttgtgtgggatttaggagttttatgtttatgagtgatttaagagtttatttatgtatggatattgtatggatttttaggtatatatagataatgggtgtgtgtttttttttgagtatttatgttttttgggtaggttagtaaggattattagtttagtaggttttgtaagaaggtttatatgtattggtgtattttttgggggttgttttgtgggatttaatgttttatgtttggtaggatgtgggtttttaagtggtttggtataaagtggttgttgatggtttttattagttttagttttaagtaagtgtttttttttttttatagtagtaatgtgggtgtggttagtttttggggttttagggggaagtttttgtggttaggatagatagataggtagatagataggtagaaggatggttgttttttatttttttgtttttgtaaattttttgagtttatgtttggtaattggttttatttgaagaggttttggtagtagttgaggggtttagtgaggttattaggttgtgagaagttataaaggaaggttttgagtttgttgggggttaagtatgggatgtttgttttgtggtgggtgagggtggtttttagaatttaggtatatagtaggattttggttttagtgtttagtttgtttagttttgatttgttttttttttttttttaatttgtattttttgtatttgaaagttagatatagatagtagttttttgggtagttagggtagttggaataggaatatgtagtgggaatggaagaattggttgatgtggtgtagggaatagtttggggtgggagggttgggggagagatataaggtttgtttttggggtggttttatatatttgtatttttatatatatttaggttagggatataagttttaggaatgttattgttgtttgtttgggtttgtgaaggtattagatattttttttggtttgggtattagttatatttttttttgttatgttttattatttataggatgggggtattttttgggaatttttatatttaaaggtgtgttttttttgtttaggttagggtgtgttttttttgttttatttagttaatatttattgagtaattattgtatgttaggttttgttttagatatagtagtgaatgagatagttaaaattttttgtttattttaggtaatttaaggaaatttttgtatttataatttttttttttttttttttttttttttttttttgagatagagttttgttttgttgtttaggttggagtgtagtggtgtgattttggtttattgtgagttttgttttttgggtttatgttatttttttgttttagttttttggtagttgggattataggtatttgttattatgtttggttaattttttttgtatttttagtagagatagggttttatagtgttagttaggatggttttgatttttggattttatgatttatttgttttagttttttaaagttttgggattatagatgtgaattattgtatttggtttttaaaaaataattttttaaaaattagtagggtgtggtggtgtgtgtttatagttttagttatttgagaagtagaagtgggaggattgtttgagtttaggagtttgaggttgtagtgagttgtaattatagtattgtattttagtttggattatagaataagattgttttaaaggaaaaaaaataaaatataaaaaaagatatttttaaaagataaaaaattttttgtttttagggagttgatagtttagatggggagatagataagtaaataataataggttgggtgtggtggtttatgtttgtaattttagtattttgggaagttaaggtgggtggattatttgagattaggagttagatattaatttgggtaatatagtgaaaatttgtttttattaaaaatataaaaattagttgggtgtgttggggtatatttgtagtttttgttattttggaggttgaggaaggagagttatttgaatttaggaggtagaggttgttaggtagggtggtttatttttgtaattttagtattttgggaggttgaggttggtagattgtttgagtttaggagtttaagattagtttggttaatatgttgaaattttatttttattaaaaatataaaataattagttggttatggtggtatatatttgtagttttagttattgaggaggttgaggtaagagaattatttgaatttgagaggtggaggttgttgtgagttgatattgtgttattgtattgtatagagtgagattttattttaagaaaaaaaaaaaaaaaaggggttaggtgtggtggtttatgtttatatttttagtattttgagaggttaaggtgggtagattataaggttaggagattaagattattttggttaatatggtgaaattttgtttttattaaaatataaaaaattagtttggtatggtggtttgtaattttagttatttgggaggttgaggtaggggaattgtttgaatttgggaggtggaggttgtagtgaattgagattatgttattgtattttagtttggtgatagagtaagattttgttttaaaaaaaaaaaaaaaaaaaaaaaaaagaaaagaaaagaaaaagaaaaaaaataataaaagagagagagagagtatagttatgattatagtgttgtatattaatattaggtgatatgatagatattgttaatttttttagttttagttttttttagttggaatatggggataatataatttttataagtttaggagttttaagtaggttattgtgtgtatattttttgttattgtaagtgttataaaaaaatgtggattatttttaagtgtattgtgatttattttattttattttatttttgagatagagttttattttgttatttaggttggagtgtagtggtgtgattttggtttattgtaatttttattttttaggtttaagtgatttttttgttttagttttttgagtagttgagattataagtgtgtattattatgtttggttgatttttttgtatttttagtagagatggggttttattatgttggttaggttggttttgaatttttgggtttaagtaatttattggttttggttttttaaagtgtagggattataggtaggagttattatgtttggttatattttattttatttatttattttttgagatggagttttgtttttgttgtttaggttggagtgtaatggtatgattttagtttattgtaatttttattttttaggtttaagagatttttttgtattagttttttgagtagttgggattataggtatgtattattaatgtttggttaattatattttttttttttttttgtagagatagttggggttttgttatgttgattagattggttttgaatttttggttttaagtgatttttttattttagttttttggagggttgggattataggtgtgagttattgggtttggtgtgttattaatttttgaatgaggagttttataattgaagggatttgggttgattgttgtatttttagtttttgatgtgttgataggtatatagagaattgaaaatatagatatatgtttttgtttttttgtatataagtatattttagtgttttggatttttatatatattttggtatattgatatgggggtattattgattataattatttgtttgattagggatgggtagtagatggagaaatgttaggtaaggagggtattttagttatgggttataaggatgtattttgagtaatttgtgggaatttaaggagtttgtataagtgaggtgtttagtaggattgaagtagggatgggggaagtaggttttagtaaggagaaagtgggggtatgtgtgtgtgtaggatgagggaggttatgtttaggatgggggtatgtttgtatttaggtttaggatgatatttttgatgtttattagtagtaggttgattgtgtagtagtttatattttgaggtgtatttgaggggttatagttttgtaagtttatagttataatatggaagtggttttggaatttttggagttggtaatgttaggagaatttgttaggtgggtgagggagggaggttgagttagggtttttaggttgtatttgtattttatgtatattagtaattattggtaaatttttttttttgttttaaattttttttaaaaggaggatggggaattttaggtagaggtagaggttgaggttgaagttagttatattttgaatttagggaattttaattaattttaatatttttttgttttgtttttttagggtttagggattttgggtatgttggtttagtatttttatttttatttatgtttagtttgttttgatttatatagtttttttttttgttttttgggagtttaagttttatttgtttttgagttttgtgggttttaggtttttggttttagatgtattagtttttagggaagttgtgtagaaatagtatgaggggtttgttattttgtttagttgagatatagtgtagatgtaggtttgagttttagggggagggtatagtttgaagtttggggaatttttttttttgaggtttgaattgttttgattttatgtgattttgtagttttgatagtgtttttgtgtgattattttgaggtttaggaaattgtgtttatttagtgaggggttgtttaggtaggtgggggatgtgttttgatggtgtttgtagtagttgtgttggggttggtatagtatgtgtgtgagtgttatgtagttgtagattgttgtggttattagtgttattgagaatattaggttttatatgaaggtgtgtagtagttttagtgataggtgtgatggtgttagtagtgtggttattattagttttggtatgttgttgtgttttgggattatggtggtgttgttggttaggggtatttgtagtagtggtgaagtggtgttagggtttaggggtttattgtttttggtttggggtttttttgtgttgttgggatttgtgggatgtgttgaaggaagaggtgggtggttttgatagaaaatagttagagtgtattatttatttgagtgttaggtaaatatttgggtgtgatagggataggaaataagggtagggtgtggaggttggggaggaagaggttggaaaggggggaaataaatgggtggggtttagtaggttttgtgtggggtttagggttggggtggggtttaggaagatttagtagtgggtgggtgagggtttaaaggtggtaattttgggttgggtgtggtggtttatgtttgtaattttagtattttggtaggttgaggtgggtggattatttgagattaagagtttgagattagtttgggtaatgtggtgaaattttgtttttattaaaaatataaaaattagttgggtgtggtggtgggtgtttgtagttttagttatttgggaggttgaggtaggagaattgtttgaatttgggatgtggaggttgtagtgagttgagattgtgttattgtattttagtttgggttataatagggaaattttgttttaaaaaagaaaaaaaaaaaaggtaattttgagtttagataaattttaaggaggggattttggatttttagttaagtgggtgatatttggagtgaggggtggggtatatgtagagtaggtgtggtttataagttaaaaaggagaaagagttggaatggtgggtttggtttatgtgggtgggtggggagagggtggattttagaggaggtgaggtttaatattgggtgaagaaggtgggagtttgggttaatgagttgatggtaggttggggagggggtggtggggtggggtgggtaatgggtaatgagatggagggtggggttgggatttaatatggtgggttaggagggtttggaagatgaagaagagggataggtaatgttaggtttaggattaggagggaggtgtgggtggtattagtggttggaggaggttttgggaggtttggttgatggttgttgtttggtgttatttatttaggggtgtgtgattttttttttggtttggttttaaagatttagtagtattgattttatttagttgtggttttaatggtgggtttagtggttttggtttggtgttgtttttttgttggtttaataggtttgttagtttgtttttgtatgtttgtgattggatggtggtggttattgatgtttaagtgataggttttggtttgggagttaatttgtaggtgttgaggtttaggttttgagagtgggttgaggaggtgtggatattttgatttttagggggtaggtttggtttttttgaggaggatttggtttatgaatgattggagttttggggttttggttgaaagaggaagtgggatagggttgggtgtgatggggtttagagttatagagttttgtggttttgttgtttttgtaagaagttagtttttggttaggtgtggtggtttatgtttgtaattttagtattttgggaggttgaggtgggtggattatgaggttaggagattgagattattttaatatggtgaaattttgtttttattaaaaatataaaaaattagttaggtgtggtggtgggtgtttgtagttttagttattagggaggttgaggtaggagaatggtgtgaatttaggaggtggaggttgtagtgagttgagattgtgttattgtattttagttagggtgatagagtgagattttgttttaaaaaaaaaaaaaaaagtagttagttttttttttttattttgtaatttttttttgatatttttgaatattttagggatagttattatttaattatagagtaattttattaagtttaagtagtataattatatttttgtagtatagattatgaatttgaaatttgaggatgaagttatttgtttgaagatatatattttgtaaaatagttatttgtaaagatgtagggaaaaaggtagtgatttgtggttatatttttttttttttttggaagtagttattggaatgtttttagtttttttttttttttttagatggagttttgattatagtttattgtagttttgaatttttgggtttaagtattataatttgtagttgggattataggtttgtgttattatatttagttaattttttaaaaattttttagagagatgatttgttatattgtttaggttggttttaaatttttggttttaagtaatttttaagtttttattttttaaagtgggattatagatgtaagttattgtgtttgatttttattttttgatttaattaatgtatgatattagttattgatttgtttatattattattttggatgtgttgttttttgtttttttgttagttttttttaaaaatattttatttgttattttttgtttttttttattttttatttttatttatatatttttgtattgttaaggttgttaaatattatattgttttgggattataattaagtttatgaagttgttatttaaaggtgaatagtggtttatgttttgttttagtgaataatgtattttaagagttgaatagattattatgattatattgtttatagtgtataaatttttgttttttttggattatttaattattattttttttttgttgtgtgattagtttatattaaagttttgggggtttttttgtttttgttttttttgagatgggagttttattatattatttaagttggaatgtagtggtgtgattttggtttattgtaatttttgttt

SEQ ID NO: 266 - DNA, 13670 bp, Artificial Sequence
  chemically treated genomic DNA (Homo sapiens)
aggtggaggttgtggtgagttgagattatattattgtattttagtttgggtgatatggtgagatttttattttaaaaaaaataaaaataaaaaaatttttaaagttttgatgtaggttaattatataataaaagaaaggtagtggttaagtagtttagggagaataaaagtttgtatattatgggtaatgtaattatagtggtttatttggtttttgagatgtattgtttattgaggtagaatataaattattatttatttttaagtggtaattttatggatttagttatggttttaggatagtataatgtttagtagttttgatagtataaaggtatatggataaaagtgggaggtggaaaggggtaagaggtgataagtggagtgtttttaaaggaaattaatagggaaataaaaaatggtatgtttggggtagtgatgtgagtaagttagtggttgatgttatatattggttaagttaagaaataaaggttaggtatggtggtttgtatttgtaattttattttgggaggtggaggtttgaggattgtttgaggttaggagtttgagattagtttggataatatagtaagttgtttttttgaaaagtttttgaaaaattagttgagtgtggtggtataggtttgtagttttaattataggttgtagtgtttgagtttaggagtttgaggttgtagtgagttatgattgaaattttatttgaaaaaaaaagaaaaagttaaaaatgttttagtggttgtttttgggaggaaggggaggtgtagttatagattgttgtttttttttttatatttttgtggatggttattttataagatgtatgtttttaggtaaatgattttatttttgaattttaggtttatgatttatattataggaatgtgattatgttatttagatttaatagggttgttttatggttaagtgatggttgtttttaaaatgtttaaggatattgggagaaggttgtaaaataggaggaagaagttggttgtttttttttttttttttgagatggagttttgttttgttgttttggttggagtgtagtggtgtaattttagtttattgtaatttttgttttttgggtttatgttgtttttttgttttagtttttttagtagttgggattataggtgtttgttattatgtttggttaattttttgtatttttagtagagatagggttttattatgttaggatggttttgattttttgattttgtgatttgtttgttttggttttttaaagtgttgggattataggtgtgagttattgtgtttggttagaagttggttttttgtagggatagtagggttgtaaggttttgtgattttaggttttattatatttggttttgttttatttttttttttggttagaattttagaattttagttatttataggttgggttttttttgggggaattaggtttgttttttaggaattagggtatttatgtttttttggtttgtttttggagtttgggttttaatatttgtagattggtttttgggttaggatttgttgtttgaatattagtggttgttgttgtttaattatagatgtataggggtgggttggtgggtttgttgggttagtaggaggatggtgttgggttgaggttgttggatttgttgttggaattatagttgggtgaagttagtgttgttaggtttttggagttagattgaagggagggttgtgtgtttttgggtgggtagtattaggtggtggttgttggttgggttttttgaagttttttttagttgttaatattgtttgtgttttttttttagttttagatttggtattgtttgttttttttttttgttttttagatttttttgatttgttatattaggttttggttttgttttttgttttattgtttattgtttattttattttattgttttttttttggtttattgttagtttattggtttaggtttttgttttttttgtttaatgttaggttttattttttttaggatttattttttttttgtttatttgtataagttaggtttattattttaatttttttttttttttggtttgtaggttgtatttattttgtatatgttttgttttttattttaggtgttgtttatttaattgaagatttaggattttttttttaaggtttgtttgggtttggaattgtttttttttttttttttttttgagatggagtttttttgttgtgatttaggttggagtatagtggtgtgattttagtttattgtaatttttatgttttgggtttaagtgatttttttgttttagttttttaagtagttgggattataggtgtttgttattatgtttagttaatttttgtatttttagtagagatggggttttattatgttgtttaggttggttttgagtttttgattttaggtgatttgtttgttttggtttattaaagtgttgggattataggtgtgagttattgtatttggtttggaattgttgtttttagatttttatttatttgttgttgagtttttttgggttttgttttggttttaagttttgtataggatttgttaggttttgtttatttattttttttttttttaatttttttttttttagtttttgtattttatttttgttttttgtttttgttgtgtttaggtgtttatttggtatttaggtgagtggtgtgttttggttgttttttgttggagttgtttgtttttttttttagtgtgttttataaattttgatggtatggaggggttttaggttaagggtgatgggtttttgagttttgatattgttttgttgttgttgtaggtgtttttggttggtagtgttgttgtggttttggagtgtggtgatatgttggagttggtggtgattgtgttgttggtgttgttgtgtttgttgttgaagttgttgtgtgtttttatgtggagtttggtgtttttggtggtgttggtggttgtggtggtttatggttgtatagtgtttatgtatgtgttgtgttggttttggtgtggttgttgtgggtgttgttggagtgtgttttttgtttgtttgagtgattttttgttgggtgagtatggttttttgaattttaaggtgattgtatgggggtgttattggggttgtggggttgtgtggggttgagatggtttaagttttgggagagagggttttttaggttttaggttgtgttttttttttagagtttgggtttgtgtttgtattatgttttggttggatgaggtaatggattttttatgttgtttttgtatggtttttttgagaattggtatgtttggggttaggggtttgaggtttatgggatttgggggtaggtggagtttgggtttttaagaggtagggaggagggttgtatagattgggataagttgaatatagatggggataggggtattgagttagtatatttaggatttttaggttttgaagggataggataaaggggtattgaggttgattgaagttttttggatttagggtgtagttggttttagttttagtttttgtttttgtttgggattttttattttttttttaggggaagtttagagtaggaaggagggtttgttaatggttgttgatgtgtgtagggtgtaggtgtaatttgagggttttgatttagttttttttttttgtttgtttggtaggtttttttggtgttattagttttgggagttttagagttgtttttatgttgtggttgtggatttgtgaggttatggttttttggatgtattttgggatgtggattgttatataattgatttgttgttggtggatattaaagatgttattttaggtttgggtgtagatatatttttattttaggtgtggttttttttattttgtatatatgtatatttttgttttttttttgttggaatttattttttttatttttgttttagttttattgggtattttatttatgtgagttttttgaatttttataggttatttgaagtgtatttttgtggtttatgattggggtgttttttttgtttggtatttttttatttattatttatttttggttgagtggatggttgtggttagtggtgtttttatgttggtgtattaaggtgtgtgtgggagtttgggatattgggatgtatttatgtgtaagggggtagggatatgtgtttgtgtttttaattttttgtatatttgttaatatattaggggttgagggtgtagtaattaatttaggtttttttggttgtggaattttttatttggaaattaatgatatgttagatttagtggtttatatttgtaattttagttttttgggaggttgaggtgggaggattatttgaggttaggagtttaagattagtttggttaatatagtaagattttaattgtttttataaaaaaaaaaaaaaaatgtaattagttaggtattggtggtgtatgtttgtaattttagttatttgggaggttgatgtaggagaattttttgaatttgggaggtggaggttgtagtgagttgagattatgttattgtattttagtttaggtaataagagtaaaattttattttaaaaaataaataaataaaataaagtatggttaggtgtggtggtttttgtttgtaatttttgtattttgggaggttaaagttggtggattgtttgagtttaggggtttaagattagtttggttaatatggtgaaattttgtttttattaaaaatataaaaaaattagttaggtatggtagtgtatgtttgtagttttagttatttgggaggttgaggtaagagaattatttgaatttgagaagtggaggttgtagtaagttaagattgtattattgtattttagtttggatgatagagtgagattttgttttaaaaataaaataaaataaaataaattataatatatttaggagtaatttatatttttttatagtatttatagtaataaggaatatgtatatagtaatttatttaaggtttttgggtttatgaaggttgtattatttttatgttttagttggaggaaattgaggttggggaggttaataatgtttattatattatttgatgttaatatgtagtattgtggttataattgtgtttttttttttttttttgttgtttttttttttttttttttttttttttttttttttttttttttttttttttgagatagagttttgttttgttgttaggttggagtgtagtggtgtgattttagtttattgtaatttttgttttttaggtttaagtgatttttttgttttagttttttaagtagttgggattataggttattatgttgggttaattttttgtattttagtagagatggggttttattatgttggttaagatggttttgattttttgattttgtgatttgtttattttggttttttaaagtgttgggagtataggtgtgagttattatgtttggtttttttttttttttttttttttgagatggagttttattttgtgtagtgtagtggtgtaatgttggtttatggtaatttttgttttttaggtttaagtgatttttttgttttagtttttttagtagttgagattatagatgtgtgttattatgattggttaattattttgtatttttagtagaaatggggttttagtatgttggttaggttggttttgaatttttgggtttaagtgatttgttggttttagttttttaaagtgttgggattataggagtgagttattttgtttggtaatttttattttttgggtttaagtgattttttttttttagtttttagagtagtggggattgtagatatgttttaatatgtttagttaatttttgtatttttagtggagatgggtttttattatgttgtttaggttagtgtttaatttttgattttaagtgatttatttgttttggttttttaaagtgttgggattataggtgtgagttattgtatttagtttattattgtttatttgtttgtttttttatttagattgttagttttttgagggtagggagttttttgttttttgggggtgtttttttttgtgttttgtttttttttttttgagatagttttgttttgtggtttaggttggagtgtagtgttgtaattgtagtttattgtagttttagatttttgggtttaagtgatttttttatttttgttttttaagtagttgggattataggtatatattattatattttgttaatttttaaaaaattattttttggaggttgggtgtggtggtttatgtttgtaattttagaattttgggaggttgaggtgggtggattatgaggtttggagattgagattattttggttaatattgtgaaattttgtttttattaaaaatataaaaaaaattagttggatgtggtggtgggtgtttgtagttttagttattgggaggttgaggtaggagaatggtgtgaatttgggaggtggagtttgtagtgagttaagattatattattgtattttagtttgggtgatagagtgagattttgttttaaaaaaaaaaaaaaaaaaaaaaaaaaaaaaaaattatagatataggggtttttttaagttgtttaggatgaatagggagttttgattgttttatttattgttgtgtttagaataaggtttggtatgtagtagttgtttaataaatgttagttgaataaagtagaggaaatgtattttggtttgggtagaggaagtatatttttggatatgggggtttttaggagatgtttttattttgtggatagtgaaatatggtaggagggaatgtagttggtgtttaggttaggaggggtatttagtatttttatagatttaggtaggtagtagtggtatttttgaggtttgtgtttttgatttgggtatgtgtaggggtgtaggtgtatggggttattttaggagtaggttttatattttttttttaatttttttattttagattattttttgtattatattagttagtttttttgtttttattatatgtttttgttttagttgttttggttgtttgagaagttgttgtttatgtttgatttttaggtatagagggtgtaggttgaagggaggagggaagtaggttggggttgggtaggttgggtattgaagttagagttttgttgtgtatttagattttgaagattatttttatttattgtaagataggtattttatgtttgatttttagtgagtttgaggtttttttttataattttttatagtttggtggttttattgggttttttaattattattgaaatttttttaggtgagattagttgttaagtataagtttaggagatttgtaggggtaggggggtgggaggtaattatttttttgtttgtttgtttgtttgtttgtttgttttggttataggaatttttttttggaattttaggagttgattatatttatattgttgttgtggggggagaaggatatttatttggagttggggttggtggaagttattggtagttgttttgtgttgggttgtttggaggtttatattttgttaggtatagggtattggattttatagagtaatttttaggagatgtattagtatatgtgggtttttttgtaagatttgttggattagtggtttttgttggtttgtttaggaggtatggatatttaggaaggaatatatatttattatttgtgtgtgtttgggagtttatataatgtttatatatgggtgaatttttgaattgtttataggtatgggatttttggattttatataagtgtatttatgggtgttttgggatatattaatttttatatttatatataggtatggatgtatgtgtgtgtaataaatattttgattttgggaattgggtatattttttttttagtggagttagatgttgagattgagtgttttattttttttttttttggggttttattttgtgttttgttaaagttgtttttttgttatagttgtatagattttaaattttgatttttttgtttttgtttttgattttttgtttgggtttttagtttagtgttattttgaatataatattgttgattatatttggttattttagtttaaatgtatgttaattgaaatgaaatataatgaaaatgtagtgtttagttttattagttgtattttatttttttttttttgagatagagttttgttgtgttgtttaggttggatggagtgtagtggatgtaatttaggtttattgtaatttttatttgttgggtttaagtgatttttgtgttttagttttttgagtagttgggattataggagtgttattaggtttgattaattttagtatttttagtagagatggggttttattatgttggttgggttggttttgaattgttgattttaagtgatttgtttattttggttttttatagtgttgggattataggtgtgagttattgtgtttggttatattagttgtattttaagtgtttaattgttgtattagtgaagaaagttgtgtgtggtagtgttgatgagggtaattttagtttaagagtaggggttagggttgattatagtggtttaaatttgtaattttagtattttgggaggttgaggtgggtggattatgaggttaggagattgagattattttggttaatttggtgaaatgttgtttttattaaaaatataaaaaattagttgggtgtggtggtgggtgtttgtagttttagttatttaggaggttgaggtaggagaatggtatgaatttgggaagtggagtttgtggtgagttgagattgtgttattgtattttagtttggtaatagagtgagattttattttaaaaaaaaaaaaaaagagtagggggtttttttgtttggtttttggtaatttttttaagggtagatttttatgagtaggtaggtgggtgtgtagattttttatttttttttagttagttttaggagagtttttataagtttttttttttattttttgttatgattttaggtttggttaggttaagtttttttgttttagtttgggttggtttgttttagatttttgggaaaatagtttttgtttttgttaggataagtgagattttggattttgggtaggaagggattagtttttagaaaagttatttgggatttgaggtttgtttttttagtttttggaaatttttgttttaaattagttatagtttttgttgattttggagttttttggggtggggatgggtggggggtggtggttatatgtggagggtgtgttatttagttttaggttgattgtagtattagtttgtatttttttggtttgtgtttggttttttggggatgttgttattattatttgtattatgaggattgagaggttttgagaaatatatttttttgtttttgagataggtttgtttgttggttatttttttttgtttttttttatttttagtataatattttttttttgtttgtttgtttgtgagatggagttttgttttgttgtttaggttggagtgtaattgtgtgattttggtttattgtagtttttttttaggtttaagtgatttttttgtttttgttttttgaatagttgggattataggtgtttgttattatatttagtttatttttgtattttttttttttttttttttttttgagatggagttttgttttgttttaggatggagtgtagtggtgtgattttggtttattgtaagttttgttttttgggtttatattatttttttgttttagttttttgagtagttgggattataggtgtttattattatgtttggttaattttttgtatttttagtagagatagggttttattgtgttagttaggatggttttgattttttgattttatgatttatttgttttggttttttaaagtgttgggattataggtgtgagttattgtatttggtttatttttgtatttttagtagagatggggttttattatgttggttaggttggttttgaatttttgattttattatttgtttattttggttttttaaagtgttgggattataggtgtgagttattgtgtttggtataatatttttttatttaatatagatattaggtagtgttttaggttttagtgatagagtgtgagttagaaagagtttaaggaggagagagttgatagggtttagggaaggttttattgaagatttataggtgggattttagttagaggatgtatttatttgttgttgttttgagatagggttttattttgttgtttaggttggagtgtagtggtgtgatgtaagtttatagtagtttttattttttgggtttaattaatttttttgttttagttttttgagtagttgggattataggggtatattattatgttaggttaatttttaattttttttttgagaatggaggtttgttttattgtttaggtgggagtgtagtggtgttattttagtttattgtaatttttattttttgggtttaagtgatttttttgttttagtttttttagtagttaggattatagatatatgttattatatttggttaatttttgtaattttagtagagatggggttttattatgttggttaggttgatttttaatgtttgattttaagtagtttgtttgttttggttttttaaaaattttttatagagatagatgttttattatgttgtttagagtggttttaaattttttggtttaagtgatttttttattttggttttttaaagtgttgggattttaggtatgagttattgtgtttgtttaggatgtattttttggtggagtgggaagtagtgattaggaaggttttaggtgggaagaagtttgggttattggagttataatatgtaggttagggttttgttaaggtagagtgagtgaggaggttttagagaagaggttatatagttagattgttaggggttgtgaggagtttggatttgatttttaaggggagttaggggagggtttttagtagggaagggatatggtttgtattttgaagagttttttgtggtggttggatagttttatgtaagagtgtgagtgttgaagtttgtggggggttgtgtgtggttatagtatagggtggttttattgttttgattgagtagggatttttagagttgggtttaatttggggtttttttgttaggggaggagtaatgttttttgttttggggaggtgagaagatgggtaggaggaggagggagtttttgagatgtggggttgtggatgttggagtttgtggtggaggtttggggtgaggaggtttgtggataggattaggatggtgtttaggggtaggtgggtttggtgatggttgttggggtgatgggggatgggttgatggttgattggaatgggtagtggttgtttgagtgattggaggggtttaggtaaaggttgatgggaggtttgggatagttgtttgggtgatggagatttgttgatggttgttagggtgatggaaaggtgtttttttttgtttttgtggttgttggtgggagggaggtgggggttttttggggaagatgattgtgttgattgggtagagttttggtgagtaagttaatagaaaattgtgttttgttgtagatttgttttttttagtttgagttaattttggtttgttttttttttttttttttggtttaagggtttggtgtgtgtattttttagggtgggagtggggattttgggggtttgggttgggattttttgtatgattggtttgtttttttttttgtttttagattattttttattatttatttatttatttatttatttatttatttattttgagggttgtattgatggtttagtagtagaatttttattttttatttatttatttatttatttatttgtttttgttattagttttaggaggggtggtggaagataaagttgggttttgatattgttagtagggtgtgattaggttttggtggaatgagtaattggggaggagtatttatttgggggaagggagggaaggttttttggaggaagtagttttggagttgaattttgtaaagttgtgttttgatttatagaagttttttatgttgggatgatttagtatttttgtgagattgggaggaaagtttgggttaggaagatgtgagattataaaaggttttatatgttagtaggggagggttttggatagatttgtgtgtttggaatgttatttgggggatggtgagaaggttggattagaggatgggaaggttttagaggaggatgggtgtggtttaggtagtggagaatgagatttaagtttaggtattggaagaggagtagatatgttgagaaggtatagaggtaggtttgggatatatttagtttgatggtgttggattttggggtagggatttagaagtatgttatgggttaaagataaaaatagtttagtaagtattggtgtattgtggggtagagaggtttttaagttgggagtgagggtgaagtttttttagagtagaatggagaataagattggagattgaattttgaggatttttaatattttagagataggtagaggagagaggttataaaggtaggaggtgaggttaggtatggtggtttatgtttgtaattttagtattttgggaggttgaggtgggtagattataaggttaggagattgagattgttttggttaatatggtgaaattttatttttattaaaattataaaaaattagttgggtatggtggtatatgtttgtagttttagttatttgggaggttgaggtaggagaattatttgaatttgggaggtagaggttgtagtgagttaagattatgttattgtattttagtttgggtgagagagggagattttattttaaaaaaaaagtttaggtatagtggtttatatttgtaattttagtattttgggaggttgaggtgggaggaatatgaagttaggagtttgagataagtttgtttagtatagtgaaattttgtttttattaaaaatataaatattagttaggtgtggtggtgggtgtttgtaattttagttatttgggaggttgaggtaggagaattgtttgaatttgggaggtggaggttatagtgagttaagattatattattgtattatagtttggatgatagagttagattttattttaaaaaaaaaaaaaaaaaaaaaggtaggaggtgaattaggtaaaagtgatgttttagtaatggaggagggaggagtgttaaggaatagggatgtagtttttggtgttataagttgttgagagataagtgtggtggtttatgtttttaattttagtattttgggaggttgaggaaggaggattatggtagattaagagttttgagattagttttggaaatattgtaagattttttgttttttaaaaaaaaaaaaaaaaatttaattgttgggtatggaggtgtgtgtttgtagttttagttttttaggaggttgagatgggaggattgtttgagtttgtgaggttaagattataatgagttgtgattatgttattgtattttagtttggagatagagtaagattgtgttttaaaaataaataaataaaaatttaggttgggtgtagtggtttatttgtgtaattttagtatt

SEQ ID NO: 267 - DNA, 3479 bp, Artificial Sequence
  chemically treated genomic DNA (Homo sapiens)
gttggagtgaagtttgtgggatgttgtagagaaaattatttaaaagtatggtattaattttgaggagattgtggttgaggagagttgggattatgtgtagttttaggtaagttttttttttttagtttttttttggattgatttgttttagttttgtgtttggaggagattttattttaatgtgggtttgatttttagttttatgattttaatatattttaattttttttaggtttgatgttttttattttttagatgatataattgtttttggtgttgtttggttttttagtatttagattttggtgtggttttgttatttattttgagagattttgtttttgtttttgttttgattagaggttgttaggtttttagttttaagattttagtgagatatggttttttattttgtagtgattttggtttttattggattttgtttttgatgagatttatatggttttgtatttttatttatttgttgggtattagaggtttaattgtattatttatttaatttttagtttatagtgtgattttgtagttttttttttagttttaggttattttgtgatttgttttttttagttttatgtttttgtaatgttttttggttttggttttattgtgattttagtttattgttttttattttatatttattatttagttttttgttttttgatttgattttatatttattattttgttttttgatttttaatattatatgtttttagttttggtttttttgatttgtattttttttttagttgtgttgttgtggttggtattatttgtaggattggttttaagtttttattttgagaggtaatgggttggaggtgtattgtgtgttttgtttttgttataatttgttggtgattaatgattttataattttagataaggtgattttgttttagtttagtaggtttggatatttggtgtggtttagatatagtgtagatatttgtgttgtttttgtagagagttatatttattgtgaggtgggtaggggtttggagtataaatttgttgaatggggtggggtttgtgggagggggagggttgttagtgagtagtggtttgagaaagggtggggtttatgagaaaaggaaaggtatggtaggaggggtggggttttttgaagggggtggggtttgtaggaagggtagggtttaaagaaaaggttgggttggttttggaatatagatgtttagggaggggttaggtttggaaaaggtgaagtgagggtgtattagtaaggagattagagtgttttggtgattaggggagtgggtagatgtttgaagatggtgagggttggtttgaaaagaatgttgggtttgggtttgagagttttagaaagaatttttttaatttttttttatattttttagggttgtgtgtagggtttttagaagtggttgtataataattttatttttatagtgggtatttgtttgggtgttggtttatttgaggtgatttggttttgtttttatttgtgattggttttaaatttttagatggttttgttttttattttgtgttttttggttgtttgggaaggatgagtttagggtggagtgtagtttattttggtttttttgttgttttatttagtattggagggtgggggtggtttagttttagggagttttgattgggtgtatgtagggaaagttttttgttattggttgtgattttttttttttttttttgtagatgattgttatggtgttgagtgtatagttatagtgtagggtattttgttggaaatgtgagttgtatgtgttgggtgttggggatttgagttttgggtttagtttgattgttgatggtggtggtgggtatagtggtagtttgtggggtggttggggtatggtgggtgtttgttttaattggggagataaggtattgtagggtaagttgtttatggttttggggttttggttgttgtgggtttaagatgaggattagtttgatattggaagtgtgggtgtagaattagaggaggtataattagaggttgaggtagagggggaagatagatgagtttttaaaataaaggattttgggtttgtttttgattttatttttttttagtttttatttttatttgtagtagttatttttgttttattagttagttttgtggtagtttttgttgagttttgtttttttttatttatttttttttttagtttttttttgtttaatttatggttttatttttgattttttttgtttgggtgggtattatttttgttttgttagtatttttttgatttttttgattttattttttttttttatagtttgggtttatgatgtttttgatatttttgtgtagaaatttggattatgtttataattggtttgtttgatattgttaggttttgttttttttaaagttttgttttgtttttgttatgtgtgttgggtatttttttgttgtttgtaaatatttgtttaatttttagtttgtttggagttttttgtttttatatttttttggggatttatgtggttgtgtgtttttgttgttgttattttttttatgggatttggggtttttgtttatagttttttgtttttatttgttggtttattattatttataagattattttttatttaaattttaaataaattttttgtgtttttggtaaaatagttttattttttgttagaatataaataaataaattttgagaggggaggaaggaaattgtttagtttagggtttatttaggagagggatgagattagaaagtttaatatattgtttgtgtagtggagataaagttaagattttagtatttatttataaatattttgttatattaaaaaaaaaaaaaatgtttagggtttatttggttttgtttttgtatagaaagggtttatttttattttgtgattttataggttatggagtgagggtggtagagaggggtagaaattttagggggaggggtggttgggaaaaagtaaaggggataagttaatgtgtaattagtgttttttaagatatgtagaggagtgggggtggtttgttaggggttgaaaagaaaagttagtgttgtatttggggggttgttttatttttgtttttataatttttgatattttggagtgatttgtttttttagatatttattgtgaggttttaatattggggtttattttttttttagttttagtttgtttagttttttaattaagttttgggggtttttttaatgggggggatggttttagttgtttaggtttttgaggttaatttttttatattatagttttttttttaaataagaagtatgaggtgagttggaggattttttttgggaggagggtgttttggggggtgagttagttttggggtttttttttagtttttgattaggtggtaaatgtgatgttgggttttatgtttgttggtggagattttgaagatataggtggtgtag

SEQ ID NO: 268 - DNA, 3479 bp, Artificial Sequence
  chemically treated genomic DNA (Homo sapiens)
ttgtattgtttatgtttttgaggtttttattagtgagtgtggggtttagtattatatttattgtttggttagggattgaagggggattttaaaattggtttattttttagaatattttttttttagggagggttttttagtttattttatgttttttatttggggagagggttgtgatgtaaaggggttgattttagaggtttaagtaattggggttattttttttattagaggggtttttaaaatttggttggagagttgaataggttgggattgaggaaaggataaattttgatattgggattttatagtgggtgtttgaaaggatagattattttggagtattagggattgtggggataggagtgagataattttttaggtatagtattggtttttttttttagtttttgataggttatttttatttttttgtatgttttggagagtgttagttatatattggtttgttttttttatttttttttagttatttttttttttgaaatttttgtttttttttattatttttattttatgatttgtgagattataaagtgaagatgaattttttttgtgtaggagtagagttaggtgggttttggatattttttttttttttaatataatgagatatttataagtgggtgttagggttttgattttatttttgttgtataagtagtgtgttgaattttttaattttattttttttttaagtgagttttgagttagatggttttttttttttttttttaaagtttgtttgtttgtgttttgatagaggataaagttattttattaaaaatgtaggggatttatttgaggtttgggtgaaaaataattttgtgggtggtggtaggttgatagatggggataggaagttgtggatgaaagttttaggttttgtgggagaggtgatagtagtaggggtatgtagttatgtgggtttttaggggaatgtgaaggtggagggttttaggtgaattggggattaaataaatatttataggtagtagggaagtgtttagtgtatgtgatgggggtggggtgggattttggggagggtggggtttaatggtattgagtgagttggttgtagatgtggtttaggtttttgtataggaatattgagagtgttatgaatttgagttatagagaaaggagatgaggttagagaagttgaaggggtgttggtgagatgggggtgatgtttatttgggtgagaaaggttaggggtggggttgtgaattgggtgggaaggggttggagaaggggataggtagaaaagggtggggtttgatgggaattgttgtagggttggttgatgaggtgggaatagttgttataagtgggggtagaggttgagaaggagtaaggttggaagtaagtttagggttttttattttggaggtttatttgttttttttttttgttttagtttttaattgtgttttttttaattttgtgtttgtatttttagtgttaggttggtttttgttttgaatttatagtggttagagttttagggttatgggtagtttgttttgtggtgttttgtttttttagttggggtaggtatttgttatgttttagttattttatagattgttgttgtgtttgttgttgttgttagtgattaggttgggtttggggtttgaatttttagtgtttggtatgtgtggtttgtatttttggtggagtgttttgtgttgtagttgtatgtttagtattatgatagttatttgtggagaaaggggagggagattgtagttaatagtaggaggttttttttgtgtatatttaattagggttttttgaagttgggttgtttttattttttggtgttgggtggagtggtgggagggttggggtgggttgtgttttgttttgagtttgttttttttaggtaattgaaggatgtgaaatgaagggtagggttatttagggatttagggttgattgtgggtgggggtggggttagattattttgagtaggttgatgtttaggtaaatgtttattatggaaataaggttgttgtgtagttatttttggaggttttgtgtgtagttttggggggtgtagggaaaagttaaagggattttttttgggatttttaagtttaggtttagtgttttttttaggttaatttttattgtttttaggtatttatttgtttttttagttattagggtattttagtttttttattagtgtatttttgttttattttttttaagtttggtttttttttagatatttgtattttagagttagtttagttttttttttaggttttgttttttttgtagattttgttttttttagagggttttgttttttttgttgtattttttttttttttgtagattttgtttttttttaggttgttatttattgatagtttttttttttttgtaggttttgttttatttgataggtttatgttttgaatttttgtttattttgtggtagatgtggttttttgtagggatagtgtagatgtttgtattgtgtttggattgtgttaggtgtttaagtttgttgagttggggtaagattattttatttaggattgtggagttgttggttgttgataagttgtagtaggagtagggtatgtggtgtgtttttgatttgttattttttaggatgaggatttggaattagttttgtgggtagtgttagttgtagtagtgtagttgggagagggatatgagttagagggattgggattggagatatatgatgttggggattaggggataaggtgatgggtatgaggttaggttggggagtaggggattaagtggtgggtgtggagtgggggatagtgggttggggttatgatggggttggagttaggggatattatgggaatatggggttgggaaagatgagttatggggtgatttggggttggggaaggagttgtagggttgtgttgtggattagagattgggtgggtggtgtaattgagtttttgatatttgataggtgaataggagtgtgagattatgtgagttttattgggggtggggtttggtggaagttagagttattatggggtaggaagttgtgttttgttagggttttgggattaggggtttgataatttttggttggggtgggggtgggggtggagttttttgaggtagatggtgaagttatgttagggtttgggtattgggagattaggtgatgttggggatagttgtgttatttggggagtggggagtgttgggtttgggagggattggggtgtgttaggattgtagagttgggggttgggtttatgttggggtggagttttttttaagtatagggttgaggtgggttagtttgggagggaattggaggaggggggtttatttggaattgtatatagttttagttttttttggttgtggtttttttggggttggtgttgtatttttggatggttttttttatgatgttttgtaagttttgttttagt

SEQ ID NO: 269 - DNA, 10857 bp, Artificial Sequence
  chemically treated genomic DNA (Homo sapiens)
ttttagtgttttggggggttgtggtaggagaattgttttgggagtaggagttgtaggttgtagtgagttatgattagtttgggtgattgagtgagattttgtttttaaaataaatatataagtttgggtgtggtggtttatgtttgtaattttagtattttgggaggttgaggtgggtggattatgaggttaagaaattgagattattttggttaatatggtgaaattttgtttttattaaaaatataaaaattagttgggtgtggtggtgtgtgtttgtagttttagttatttgggaggttgaggtaggagaattgtttgaatttgggaggtagaggttgtagtgagttgagattgtgttattgtattttagtttggtgatagagtgagattttgttttagaataaataaataaaaggatagaaaggtgagtataaatatttttaatttataatatttttttgtattgttaatgttttagatatgtgttattatttttagtaaatttttttaggtgtttgtaggatgggttaaggaaggtgatgagtattagttgttttgttgaggttgttttgatgttatatgattttttaattatatgatttttagaaatggggtgtggggtgagaggaagtagggaggagagtgatttgagtagaaaagaaatatagtattttaggttggttttatttttatattgataagtagttaatgggagtgggtagttttgatttttggttaatggaaattgaggtaggtgggttattgtgttggggtttgtagtttgagtgttatttggttgttgttgtttaaggattgtggagttggatgtaggtaggagagtggttgtgtagattttttgtttgtttttgtttaggggtttgttagggttatgtgagtttgaggtttttttggagttttagttggagataatagaagaattgtttattgaaattttttgggggttttgatatattagggggagttttatgggaaagaggaagtagtaattgtagtgatgttttgttagaaggggttttttatttttttagtatttttttaaagtagggattatattatttttgatttagttttatttttgttggtaggtgttggttttttttttttttttggtggtggtgggtggtttttgtggtggtttggagttggaggggtgtgtgattttgggttgggagttttgagggtttgggaatgagatttgagattttggttttttgaaggtagtagggatttgggagtggtgattgaatttggtttggtttttttttatttttttttgttgtgggtgggatgagttagtttttgttttttttagttatttttttttgtttatttgtagttaggttggttttttttttgggaattttttttttttttggtatttggagttggggggtgttatttagtggaagataatggagttagggttttgaagaggttgttgttttttttggttgttttggtggtgtagggtggtatgagagattgtgatttgtttttttatttttgtttttgtatgtgagtgtttgtatttagtagaagtatatattatatttttttaatttagggtaaataggaggggttatatgtataggtaatttattagggagttgaatatttttgtgtagatagatttttttttttagtaagttatggtagtggatagtttgttgagaatatttaggaagtaggtggtgttagttgtaggtgttttgtttgggagttgtggggttgaggagagggtttattgtttaggattagtgaattttatttttatttgtttaggaggtggttttttggggatgttgagttaggggaggggtatttgaggaaagttaggtggagtagagaggatgtgagtgattgggtgggtgagattttttgtttttttttttgtagtggtatttatatttagatttgtggggtaattgaggtatagatagagagtaattttttaggtttttatagttggtaattttaggattaggatttaagtgtgatttttaggtagtttttgtattttgtttttgttgtatttgttgtattatttttaggtattgtttattgtgttattagtgatatgaatttaggtttaatatgttttggggttattaaagtttgatgttattatgatttgatgtgtgatgtgttataggtgttttttggtatttttatggaattggttttaggattttaaaatttgtgggtgtttaagtttttgagataaaatggtgtaatatttgtatataatttatatatattttaaattatttttagattatttatatttaatataatggaaatgatatgttggttgggtgtggtggtttatgtttgtaattttattattttgggaggttgtggtaggtggattatttgaggtttggagtttgagattagtttgattaatatggtgaaatttttatttttattaaaaatataaaaattagttaggtgtggtagtgtatatttataattttatttatttgggaggttgaggtaggagaattgtttgaatttgggaggtggagtttgtagtaagttgagattgtgttattgtattatagtttgggtgatagagtaggattttattttaaaaaaaaaagagaaaaagaaaaagaaatgttatgtaaatagttgtgattttgaattgtttagggaataataagaaagaattatttgtagatgtttagtatagatgtatttattgtaagtttaattatattgtataatttagtaatgatgtaatatttttaggggtttttttgttttgttttttgagatagaattttagttttattttgttatttaggttggagtatgttggtgtgatttttgtttattgtaatttttattttttgggtttaagtgatttttttgttttagttttttgagtagttgggattgtaggtgtgtgttattatgtatggttaatttttgtatttttaatagagatggggttttattatgttggttaggttggttttgaatttttgattttgggatttgtttatttgggttttttaaagtgttgggattataggtgttagttattgtgtttaatatattttgatttttggttggatatggagggttgattgtatttaatatttttaagttttagtttttttttttaaaataaaggtgtggttgggtgtggtggtttaagtttgtaattttagtatttagggaggttgaggtgggtggattagttgaggttaggagtttaagattagtttgattaatatggtgaaattttttttttgttaaaaatataaaaattagttaggtgtggtggtgagtgtttgtagttttagttatttgtttgaatttgggaggtagaggttgtagtgagttgagattgtgttattgaatttgagtatgggtaatagagtaagattgttttaaaaaaaaaaaaaaaaagggggtgagtagatgtggtggtatgtttttatagttttagttatttagtaggaggttaaggttggaggattgtttgattttaggagtttgagtttagtttgggtaatatggtaatattttatttttaaaaataaaataaaagtaaaggtattaattattattttggatggttgttgtaaagaaatatatataaaataatggagagttttgtaattggtttttaagaggtttaatagatattattgtttttgtttttttattatgagttatttttttggttattttattgaattagttgggttagttgagtttgggagaagagttgtttaggaagtgagaggttgttttttatagagatttaaggtttagttttttttggtgatttagatgggtagtttagtgggtatatgtggtttttttttatatgtggttgagttttatttttagaatagatggagaggtaagggtagggtttagtatgtttgaggaattttagagggttttggtggtgtgggggatttttagaatataggtgttttaagggttgatttagtttttgtgtttttttttttgggtgaggaggggatatttatgggtagatggtgatttttggggaaggtagtttagattttattggttattatatttttttttttataatttttttatttttgtggttttttatgttattatgtggttgttttttgtaaggttttagtggggtgtaggtatgaatatagtgttaggtaaggaggtatttggaggggaattttggttttttttggggggattttttttttgtattttagttttgtttttttttatggttattgatgttttttttttattttagaggtggtttatatttgtatagattagatttataaaaattatgtttttttgatttttataagtttgtttagtgaggtttaggtattaggttatgtgttggggatttagatttatatatatatgtatgttagtatttatgtttataggtttgtatatgttggggtaagtgttatatatggggtgttgtaggaagttgatttttagtttttgtagatttttgtttgtttggatagggaggtgttgagaaggtttaggtagttttgggttaggattttggtttggggttagggtattgagtgattttagaattaagggtggtgtgggtttaagtagttgttagatgttttttggtattttgtaggtagattatgtggattttggtgagttgggtggttttaatagtagggttggtggttggaatgtggtgtttagatggttagttttgttttgtggtttgttgtttggattttggaggagttagttatagttgttgttgtttttttttggtgagtgttttttagtttaggtaagagttggtagtttgggtttttttaaagggttattttggattggttagaggaggatgttaggtataagtttgtggtttattattttttttgtttttttaggataaatggtttataatattgagtaggtatttgggtggtttttgttaggttgatgtttattgttttgttggttatttttgtatttttattgttttagggatttttagttgttgtttttttttagaggtgagtgtgttattagtttagtggaggggtttaggtttgtatttatgttttttttgtattttattatttgtagataaaagggttttgttaatgtaggtttttttgtgttttataggttgtggtatgtggggatggttattattgttgtttatggggtttttattgtagtgtagatgggtgattttgtttttaaagattaggtgtagttggggtgtgggtgtagggtaggtagatgggtagtatgtggagtttggaatttaggagtttagttggtgggggtagttttgatttttgtttttgtgtttttatttatgtggtatttgtattaagtaatagttttgttgtggatagaggggtagtattggggataggagggtgtgggagaaagtgtaagattttaggtttaggtgttgtgggggtggggagaggttgagttgggttggtttaatattaatttatggttagtgggtgttttttttttatgttattttgttgagggagggattggattgtgaggagggtgagttaggtttgtttaggagattattgagttttagtgttatttttaaattttagtagttgggtttgtaggttttggtgttattagttttttgtgtgatgggggagttattttttttgagtgggttggtagtattttgggttattttgtttataggtaataattttgtgggtgttatttagtgttttgatagttagtttgaatgtttggatttttttatgtgttgtgttatggttgatggtttttgggggtgttgttttatgttttaggtataaatttgggggagatgggggtatgtggagggaagtgggggtagagttgggggttaggggtagggggtgaagatggagttaggattatttttttttaggttttttgttgtgaagatagggtgtattgttgtttgtatggtgttttttgtgatttggtttatatttgttgtattatatttatgggtatttattttttggtaaagaagttttttgtttagaggattaatagggtaggtgaggaggtgggagagtattaggttaggggttggggtggggttttattgattttaagtgtaggaaaaagttttttttattttggttgttttttatgtttgttttttttttagtggttttgtttagtttggttatgtgtttggatgtatggttttggtgttttgatggttttatttgttgtgagttgtttagtgggaagtatggttgttgtttaatgtttaatgtgagtgaggggttggagttagtttggttgtgtgtttttagttatttggttttgatatgtattttataggggttttgtggtatggggttggttggttgtttgttgggagtttggttgatgtagggtttatgttattttttagtgggggattggggtagtgttagttattagtttggttgttttttgtgtgttattgagtttggaagtgataaagatttatttttgtttttatttaggttatttgttgttttgattatttgtattgttgtttttaagatattgtgtgtgatttgatttagagtaagtgtttttttaaggagaatgttattatggatttttttattaagttgtttgtgtatataggtattagaggtagggtgtagatataggggtggggttttttttttttttttttaggtttggttttaggattattgtaaggtggtgtaagtggtattttttatttttaatatttggttttagttgtggagttggtaaagggttgatatttttgagggtttttagtgttatttttgatttgttttttttgttttttttatagtgggggatgtgaaatgtgatatggaggtgagttgtttagatggttatatttgttgttgtttatagttgggggtttggggttgttgtttttttatttaggtatttaggggtggtgggtgggtgggttgagtatagtgtggtaggtagttgggttttagtgtttatttgtttttttttatttgttttaggttgtgtgttgtgaggattatatatattgttgttttgtggggtttatgtgtgatatgtagaagggtatttgtgaataggggttttattaggtgttttggatggagaaggttttagtttattttagtttgttagatttataagttttgaagagagatgttttttgtgataatgttagtagttgttttttttttgatatttgttgttaatttatgtttggggagtggggttgttgtttaattttagaggtatatgggaggggatagtattttggtttgggtaggtgggtggttaagtttttattgttttttgttttttgtatagtttataggtgatatttagttttgatagatttgtttttagttggaggtgttgtaagtaggagaggtgggttggagtaggtaggggtttggtattgtgttttatatagtggttatttataatgtttttttttgtttattttttaggttgtttgttgtttggattattagtattgttgtttttagggttatatgtgtgtagttgaggggtagtgttagtgaggaagtgagattgtggttggattggagaagatgtttgtttgttgggtttttttattttattttagagatattggttgtgattagtatattagttgtttggtggggtagatttgttgtttgagtttgggtgggagttgggtttgttgttagttgttttatgtgagtgtttttttgtttgtttttggataggggagttaagtttagtgaggggataggaatataatgttattttgtgtttttttttttgttaggttgtgtgttgtgaggattgttagtattgttgtttggttggttatatttgtaatgtgaaggtttgattttgtgagaaggaagtggtttttgtttagtttgttatttttttggtttgtagtttttatgtgggtgtgaaggatgtggagtgtggggaaggatatttttgttatgataattagatttgttgttgagataattgatagggttgggtttgttgtttttattgttaggttagtgttaatttttattttggggttgggtatggttagggattaggttttattttgtttaatttttttgtttttttttgattatttagggtgtttgttgtgttgattggtgttattgttgttttgttggtttttgttgtgtagttaggggtattaagtgtttgtgtagggaggttttgtgttgggatgtttttttgagggatttagttttgagatagttgttgtgagggatagtattgaagattttgtagtttttgggattttatttggagggtgttttttgtttaggtttttttagtatttttttttaattaaattttttttggattttattttgagttttttattattatgggaggtggggttttaatttaaggttttttttgttagaagggggttgtggtaaaagttatattataagttgttattttttttttgttttagtggattttgtggttaggtgtttttttttatttataggggtgtttgtgtgtgtgtgtgtgtgtgttttaataaagtttgtatatttttttaatagtgtttgatttgttgttttgtttgttttttttagggttttagaataggggtttatgtttattgttaatattttttttttttattttatagaaagatatatatagttttaattttattagttttatatttgttgttgtttatattggttgtattatattattttttagtttttagagttgttttagttattagttttgtgatattgtagtttagagatgggttagttagtaagtagtattttttttttttttaggggtttataaagaatgttttttttttttttagtttttatattagtagttgaggttgggttattttttttgtttttttataatagagttttttatgtatagttatgtttatataggtattgtttttttttagtttttttttttggtatttttttgtgggggtttggatttttttttttttttggtttggaggtagatatagggttttttgtaagatatgatttagtattaattatggaatagttttaaggtttttgggtttttttttggtttggggttgggagttatgtgtgagggtttttgtgggtttttggggtgtgtattttgggtgtgggtttgtgtgggaggggtggtgttaggttttgtgtgggtgttatttgatgttgaatattattagtggttgttttttttgttgttgttatgggttttttttgttttttgttttgttgtttatttttgtttttagtttgttttttgggttggtgagtgagttgtgttgtagtttgttggtgttgttgtgggagttgtttttgtggttgtggttttgtttttggggtattgtggttgtttggtttttgggtgttgttattttgtttagtagtggtgttagtgagttgttttttggagagtagaggtttgtgtggtttttgttgttgttgggttttgtgtttttgttgagtgttaggtgtgggggtgtgggtggtggtggtggtgtggtaggtggggtgtgtttttgttttttttttgtgggttggtggtgtgtgggttgtgttttgtggatatttatgtttgagtttaggttggtgttggtgttgtgtgttttgttgtttgtttgtaggttgatgtaagagtggtgtatttgtgagttggagtgtttgttgagggatatgaattaggtgtgtgggtgtggttttatgtttagttttagtagtttttttttggttagggtttgtagttttttgttgagttgtgttatggtggatttgttgaatagtatagggatggtgattgagttattgatgggtgttgtgtgtttggttttttagtttttgttgttgtttttgttgtttttgttttttgggtttgagtggtttggtatttgtgggtgttgggggttgggttggggaaaagtgtgtgttgggttgggtgttgtgttttttggtggggttggtttgttgtttatgttggtggtgtttgttttgttgttgaggtgtatgtagtgtgtggggattattagggtgggtatgatgttgtggtagatgttgtttttgaggtggttgatggagttgtagaagatgagttgttttgtttggtttagtgatggtggttgtgttagttggtttattgattgtgatagtaggaagttgggggttttgtttttggttgtttttttgtggtttaggtagtggttgaagggtggtggtggtgagggtggtttgtgtaggaaggttgtagtttttgagggtttttgttggtgtttttttaggttgggttttagtttgttggggtttttggttgagtgagtgtttttgagtttggtgtttttgtttttgtgggtatttgaaggtttggtggttgggtggttggtagagtgtggtttggtgtggaagaagttattttgggaggaggttaagttttgggagttggagaaggttgagtggagggggtttggaggtggagttttggggttttttgatggggtgggttttaggggttttttatagatgaggtggagttgggatattgaggtggtttggttttgtttgttattgttagagggttttgagagttgtagtttgtggtgttgttgttttggttttaggtagtgttttttggaagggagggagtagaaggggttgtttaggaaagggtgagggttaaagtaggttttgaatttttttagatgtaagataagagatgaatatagtggaagaggtggggagaatgtttggggtgtttaggagagatggtggggagttgttgtgtttgtttggtgat

SEQ ID NO: 270 - DNA, 10857 bp, Artificial Sequence
  chemically treated genomic DNA (Homo sapiens)
attgttaaatggatatggtggttttttgttattttttttgagtgttttaggtattttttttattttttttattatatttgttttttgttttgtatttaagggggtttggggtttattttggtttttatttttttttgagtggttttttttgtttttttttttttaggaggtgttgtttgaagttgaggtaatagtattgtaagttgtagtttttggggttttttgatggtaataaatgagattaggttattttgatgttttagttttattttatttgtgggggatttttggaatttgttttgttgggggattttgaggttttgtttttaggttttttttatttggttttttttagtttttgggatttggtttttttttgggatgattttttttgtattaagttgtgttttgttagttgtttggttgttgagtttttgggtgtttgtgggggtgagagtgttgggtttaagggtgtttgtttggttgagggttttggtgggttggagtttggtttagaggagtattggtgggggtttttgggggttgtggtttttttgtatgagttgtttttgttgttgttgttttttgattattatttgggttataagggggtggttgagggtaagatttttgattttttgttgttgtagttggtggattagttggtgtggttgttgttgttgggttaggtggggtagtttattttttgtggttttattgattattttaaggataatgtttattgtaatgttatgtttattttggtgatttttgtgtattatgtgtgttttggtggtgaggtgggtgttgttggtgtgggtgatgagttggttttgttggagggtatggtatttggtttggtgtgtgtttttttttagtttgatttttagtgtttgtagatgttgggttatttgggtttggggggtgagggtggtgggggtggtggtgagggttggggggttgggtgtgtggtgtttgttagtggtttagttattatttttgtgttatttaatgagtttattatggtgtagtttaatggggagttgtaggttttgattgagaagaagttgttggaattgggtgtgaagttgtatttgtgtgtttggtttgtgttttttgatgggtgttttaatttgtaagtgtgttatttttatattgatttgtaggtgggtggtggggtatgtagtattgatgttagtttggatttgggtgtagatgtttatgaggtgtggtttgtgtgttgttggtttgtgagggaggagtgggagtgtgttttgtttgttgtgttgttgttgttgtttgtgtttttgtgtttggtgtttagtgaggatatggagtttagtagtagtgagagttgtatgggtttttgttttttggaggataatttgttgatgttgttgttggatgaggtggtggtgtttgagggttgggtggttatggtattttgggggtggggttgtagttgtggggatagtttttgtagtagtgttagtgagttgtggtgtgatttgtttattagtttggaggatgagttgggggtggaggtgggtgatgaggtgggagataagaagagtttgtggtagtggtgggaggagtggttgttgatggtgtttaatgttaagtagtgtttgtgtagggtttggtattgttttttttgtgtgggtttgtatttagggtgtgtgttttgggggtttgtgggggtttttgtgtgtagtttttagttttaggttggagaggggtttaggggttttggagttgttttgtggttggtgttgggttgtgttttgtaagggattttgtgtttgtttttaagttggggaggagggggggtttagatttttatggggaggtgttggggaggagggttggggggaagtagtgtttgtgtagatgtggttgtatatagaaagttttattgtgggaaagtaggaggggtgatttagttttagttgttagtgtgagggttgggaagggagggggtgttttttgtggatttttgggaggggagggggtgttgtttgttgattagtttatttttgggttatgatgttatagggttggtggttgggatagttttggggattagggggtaatgtgatatagttgatgtgggtagtagtaaatataaaattggtgaggttaaggttgtgtatgtttttttgtggggtaggggaggggagtgttggtagtggatgtgaatttttgttttggggttttggggagggtaggtagggtggtaaattagatattgttaagaaagtgtataaattttattgaaatgtatatgtgtatatatataaatatttttgtggatagggaaaagtatttggttatagggtttattgaaatggggaggggatggtagtttgtaatgtggtttttgttataatttttttttgatagggaaggttttagattgaggttttattttttatggtgatggggagtttagaatggggtttagggagaatttggttagggggaggtgttagggaggtttgagtagagggtattttttgagtggggttttgagggttgtagagtttttagtattgttttttatagtagttgttttaaggttgggttttttaaaggggtgttttagtgtggggtttttttgtgtaaatatttggtatttttggttgtgtagtggaagttagtaggatagtagtggtgttgattagtataatagatgttttggatggttagaggggggtgagagggttggatgaggtgggatttggtttttggttatatttagttttaggatgggggttggtattgatttggtggtagggatagtaggtttagttttgttggttgttttggtagtaggtttggttattatggtagaagtgtttttttttatattttatgttttttatatttatgtgagggttatgggttaggaaggtggtaggttgggtagagattattttttttttgtaggattgagtttttatgttgtaggtgtagttagttgggtagtagtgttggtgatttttgtagtatatagtttggtggggaagggagtatagaatggtattatgtttttgtttttttattgggtttagtttttttatttaggggtaggtagggaggtatttatatggggtaattggtagtaggtttagtttttatttaggtttgggtagtaggtttgttttattgggtagttggtgtgttggttatagttgatgtttttggggtgggataaggaagtttggtgggtaggtattttttttagtttagttatgattttgtttttttgttgatattgttttttagttatatatgtgtagttttgggggtagtagtgttggtggtttgagtagtagatagtttggggggtgggtaggaaagggtgttgtaggtagttattatgtggggtgtagtgttgagtttttatttattttagtttgttttttttgtttatagtatttttagttggggatgaatttgttagagttgggtattatttatgggttatgtggagggtagaaagtaataggagtttggttatttatttgtttaggttaagatgttgtttttttttatatatttttgggattggatagtagttttattttttagatgtgagttggtagtaggtattggaggagggatagttgttgatattattataggggatatttttttttaaggtttgtgggtttggtaggttgaggtgagttggggttttttttatttagggtatttggtggggtttttgtttataggtatttttttgtgtgttatatgtaaattttgtgggatagtagtgtatgtggtttttatagtatatagtttagggtagatgaagaagggtaggtgggtattggggtttggttgtttgttatattgtgtttagtttatttatttgttatttttgggtatttgggtaaaagggtagtagttttaggtttttgattgtagatggtagtaggtatagttatttgggtagtttatttttatgttatattttatattttttattgtgagggaagtagagaggataggttagaagtggtattggggatttttaggggtattaattttttgttggttttatagttggaattaggtgttgaagatggagggtattgtttatattattttgtagtgattttaaggttaggtttaaaagggaggaaagggggttttatttttgtatttgtattttgtttttggtatttgtgtgtgtaggtagtttagtgaggaggtttgtggtagtgttttttttggagaggtatttattttggattaggttatatatagtgttttgggggtagtagtgtaggtgattggagtagtaggtggtttgagtggggataggggtgggtttttgttatttttaggtttagtagtatatagggagtagttaggttgatggttggtattgttttaattttttattagggggtagtatgaattttgtattagttaggtttttagtaagtagttagttagttttatgttatagagtttttgtaaggtgtgtgttagggttaggtggttgggggtatatagttaagttggttttagttttttatttatgttgggtattgggtagtagttatattttttattgggtagtttatagtaggtagaattattagggtattgggattgtgtgtttggatatatgattgagttggataaggttattggaagaggagtaaatgtgaggggtagttaggatggaggaaatttttttttatatttggagttaatgaggttttgttttagtttttggtttgatgtttttttatttttttatttgttttgttagttttttgggtagggagtttttttgttagggggtgggtgtttgtgggtgtgatgtagtgggtgtgaattaggttgtagaaggtattgtgtggatagtagtgtattttgtttttatagtaggaagtttgagaaaaaatggttttgattttgtttttattttttgtttttggtttttaattttgtttttatttttttttatatatttttattttttttagatttgtatttggggtatggggtagtatttttaggagttattgattataatatagtatgtggagaagtttgggtatttgaattgattattagggtattggatggtatttatggagttgttatttgtggataagatgatttaggatattattagtttatttagggaaggtgatttttttattatataaggagttggtggtattagggtttgtaagtttagttattggggtttgagggtgatattaaggtttagtgattttttaggtaggtttaatttattttttttataatttagttttttttttagtaagatggtatggggaaggggtatttattgattatgggttggtattagattggtttagtttgatttttttttatttttataatgtttggatttggagttttgtatttttttttgtatttttttatttttagtgttgtttttttgtttatagtagggttgttgtttagtatagatgttatatgaatgagggtataagggtaggaattagggttgtttttgttagttgggtttttgggttttagattttatatgttgtttgtttgtttgttttgtatttatattttagttgtatttgatttttggaagtaggattgtttgtttgtattgtagtggaagttttgtgggtagtagtgatggttatttttgtatgttatggtttgtggaatatagagaaatttgtattggtagggtttttttatttgtaggtggtagagtgtaggaaaagtataaatgtagatttaagtttttttattgggttgatggtatgtttatttttgggaaggggtagtaattggaagtttttgagatggtaaagatgtaggagtggttggtagagtagtgggtattaatttggtaggggttatttagatgtttgtttagtgttgtgggttatttgttttagaaagatagggaaaatgataaattatagatttgtgtttggtgtttttttttggttaatttaagatgattttttgggaaaatttaggttgttagtttttgtttaggttgaggggtatttattagaaggggatggtagtagttgtagttggtttttttggggtttaggtagtaggttatagggtagaattgattatttgggtattgtgttttagttattagttttgttgttaaggttatttagtttattagggtttatatggtttgtttgtaaagtattaaggaatgtttggtaattgtttaagtttatgttatttttgattttagggttatttagtattttagttttaggttaaggttttggtttaggattgtttgagtttttttaatatttttttgtttaggtaggtagaaatttgtaggggttgagagttagttttttatagtgttttgtgtgtgatatttgttttagtatgtgtggatttgtaagtatgaatgttgatatgtgtatatgtgtgggtttgagtttttagtatatggtttaatgtttgggttttattgggtaggtttatgagagttaggaagatgtgatttttgtgggtttgatttgtgtagatgtgggttatttttggggtgaggggaaggtattagtagttatgggagaggatagggttagggtgtagggagggagtttttttaggaaaagttagggtttttttttagatgtttttttgtttgatattatgtttatatttgtattttgttaaggttttgtgggaagtggttatatgatgatatgggaaattataggggtgagaaagttgtgaaaaaggaaatatggtggttagtggagtttgggttgttttttttagaggttattatttgtttatgaatgttttttttttatttagagaaaaggatatagaagttgggttagtttttgagatatttgtgttttgagggttttttatattattagggttttttgagattttttaagtatgttaaattttgtttttgtttttttatttattttggaagtgaaatttagttatatgtggagagagattatgtgtgtttattgggttgtttatttgagttattaggaggaattgagttttgagtttttgtggagagtagttttttattttttaaataattttttttttaggtttagttagtttagttagtttagtggggtggttagagaggtaatttataatgaagaagtaaaaatagtaatgtttgttgagttttttgggagttagttataagattttttattattttatatatatttttttgtaataattatttaaagtagtaattaatatttttatttttattttatttttagagatgaggtattgttatgttgtttaggttggatttagatttttgggattaagtaattttttaattttggttttttattaagtagttgggattgtgggagtgtgttattatgtttgtttattttttttttttttttttttttgagatagttttgttttgttgtttatgtttgagtttagtggtatgattttagtttattgtaatttttgttttttaagtttaagtaagtagttgggattataggtgtttgttattatgtttggttaatttttgtatttttagtagagagggggttttattatattggttaggttggttttgaatttttgattttagttgatttatttattttagtttttttaagtgttgggattataggtttgaattattatatttagttatatttttattttaaaggaggaaattgaagtttagagatgttaagtatagttagttttttatatttaattagggattaaaatatattgggtgtggtggttaatgtttgtaattttagtattttgggaggtttaggtgggtggattttaaggttaggagtttaagattagtttgattaatgtggtaaaattttatttttattaaaaatataaaaattagttatgtgtggtagtgtatatttgtaattttagttatttaagaggttgaggtaggagaattgtttgagtttaggaggtggaggttgtagtgagtagagattatgttaatatattttagtttgggtgatagagtgagattgagattttgttttaaaaaataaaataaaaaaatttttgaaaatgttatattgttgttgagttatataatgtagttaggtttatgatgggtgtatttatattgaatatttatagatagtttttttttattattttttaaataatttaggattataattatttatatggtattttttttttttttttttttttttttttgagatggagttttgttttgttatttaggttgtagtatagtggtgtgattttagtttattgtgaattttgttttttaggtttaagtaatttttttgttttagttttttaagtaggtgggattataggtgtgtgttattatatttggttaatttttgtatttttagtagagatgggggttttattatgttggttaggttggttttaaattttagattttaggtgatttatttgttatggttttttaaagtggtgggattataggtatgagttattatgtttagttgatatgttatttttattgtattaggtataagtaatttagaaatgatttaaagtatgtataggttatatgtaaatattatattattttattttaggggtttgagtatttatagattttggggttttggaattagttttgtgaagatattaagggatatttataatatgttatatattaggttatggtgatgttaggttttgatggttttagagtgtattggatttgggtttatattattagtggtatgatgggtagtgtttgggaatggtgtaataggtataatagaaatagggtatagggattgtttgaaaattgtatttgggttttaattttagaattgttaattgtgagggtttgagaagttgttttttgtttgtgttttagttattttatgagtttaggtgtggatattattgtggggggaggggtaggaaattttatttatttagttatttatattttttttgttttatttggttttttttaagtgttttttttttaatttagtatttttaagaggttattttttggatagataaggatgaagtttattggttttggatagtggattttttttttagttttatagtttttaggtaaagtatttgtagttggtattgtttgttttttgggtgtttttagtaggttgtttgttgttatggtttgttgggaaggggagtttgtttgtataggagtgtttggttttttggtgaattatttgtgtatgtggttttttttgtttattttaaattgagggagtatagtgtatgtttttattgaatataagtatttgtatatagaaatagggatgaggaggtgagttgtagttttttatgttattttatattgttaaaatagttagaggggatagtagtttttttaagattttagttttgttattttttattaggtggtattttttaattttgagtgttaaggggagaggaaatttttaaaaggggagttaatttagttgtaaatgagtaggaaaaagtggttgggagaggtggaagttagtttgttttatttgtaataagaggaagtaaggaggagttagattaggtttagttattatttttaagtttttattatttttgagaagttaaggttttaggttttgtttttaggtttttggagtttttagtttagggttgtgtgtttttttggttttaggttgttgtgggaattatttattattattaggagaggggaagaagttagtatttattgataggggtggagttgggttaagaatggtgtggtttttgttttgggggaatgttggggaggtagaaagttttttttaatggggtgttattgtaattattgtttttttttttttataaaattttttttagtgtattagaatttttaaggagttttagtaagtggtttttttgttgtttttggttgagattttaggggaattttaagtttatatggttttggtgggtttttgggtaggagtaggtgagaggtttgtgtggttgtttttttatttgtgtttgattttgtggtttttgggtagtagtaattgggtagtgtttagattatagattttagtgtgatgatttgtttattttagtttttattggttagggattagggttatttgtttttattggttatttattaatatagaggtggggttagtttggaatgttgtgttttttttttatttaaattatttttttttttgtttttttttgttttatattttatttttagggattatgtgattggagaattatgtgatgttgggatagttttagtagggtagttggtgtttgttgttttttttaatttattttgtaggtgtttgggggagtttgttagagatgatagtgtgtgtttggggtattgatagtgtgagggagtgttatgaattgggaatatttgtgtttgtttttttatttttttgtttgtttgttttgagatggagttttattttgttgttaggttggagtgtagtggtatgattttggtttattgtaatttttgttttttgggtttaagtgatttttttgttttagttttttgagtagttgggattataggtgtgtattattatgtttagttaatttttgtatttttagtagagatggggttttattatgttggttaggatggttttgattttttgattttgtgatttgtttattttggttttttaaagtgttaagattataggtatgagttattgtgtttggatttgtgtgtttgttttagagatagggttttgtttagttgtttaagttgattatagtttattgtggtttgtaatttttgtttttaaagtgatttttttattgtagttttttaaggtgttggga

SEQ ID NO: 271 - DNA, 5465 bp, Artificial Sequence
  chemically treated genomic DNA (Homo sapiens)
ttttggatttggtaaggtgtggtggtttatgtgtataattttagtattttgggaagtttaggtgggtggattatatgaggttaggagttttagattagtttggttaatatggtaaaattttatttttattaaaaatataaaaattagttgggtatggtggtgtatatttgtagttttagttatttgggaggttgaggtaggggaatagtttgaatttgggatgtggaggttgtagtgtgttaagattgtgttattttgttttaatttgtgtaatagagtgagattgtttaaagaaaaaaaaaaaattttagatttaatgttagttgtttgtgttagtttggggattttttatttatagggtgtagtttggttaagaggaaggagttatataatatggttgatggaatttttaatatttaagtttaggggtatatgtgtaggatgtgtaggtttgttatataggtaaatgtgtattatggtggtttattgtatagattattttattatttaggtattaagtttagtatttgttagttattgtttttgatgttttttttttttttattttttattttttgatatgttttagtttgtgttgttttttttatgtgtttatgtttttttaggttgatgtggttttgagtgatttttttttgttttttttttttaaaaataagatttaaaaggttatgttttttatgggttggaggtgttgttttgatttgttaagtatagtttaggatttagaggttgttgtggtgaattattgtaggtatttggaagttattaaggtgttttttttttgtattttagttttaagtgagggaaataagtttatggttaagggagaattatttattaatttgaatttattaaaatatataaatgtgtttattagaaatggttggttggagaagtttagtattaaattattttgtttttgaaatttattagttttatgaaatagtttgttagagagagatttgtaatttttgaatttgttgattattaatttgtataggtgttttgtgttttgagatttgagaaaatgataaaatatgtttattttttggttgggtatagtgatttatgtttgtaattttaatattttgagaggttaagttgggtagattatttgaggttaggagtttgagattagtttggttaatatggtaaaatttttgtttttattaaaaatataaaaattagttgagggtggtggtgggtgtttttaattttagttattttggaggttgagttataagaattgtgggaagtggaggttgtagtgagttgagatggggttatagtattttagtttgggtgatagagtgggatttagttttaaaaaaaaaaaaaaagtattttttaattttttgttagtttttgttttttttttattttgttttttttaggtttttgaaaagtattttttttaattttttttgtgtatatggggaaaatatgtgtttatttttattatggtgttgaaatttatttttttttttaaattgtttttgtagattgttttagtataaaatgtggtaagaggttaaagggagagatatagattagttttttggtttttgttttttaattttaagttatatttgtgaaatttatgggtttttttatagtttttaaaaattaagggtgttttttgttttttttttagatgttttttttttattgttggtagtgagtgggagatagtttagtgtggggtaggggagtattgggtttggagatggaaggtagtgttaaaagtgttgttggaaaatttttgagtgttaattgttgtttgtgtgagtttttaaatttataaatttttaatatttgtagtttttgggttttttaggatttttattgattttggtggtagagagggtaggtttgagatgtagtgatttgagggtatatggttaatttttgttattttaagattatattggggaattagattgatttttttaattttgaatttgttttggttttgggtggtttaaagggttttttttgttgtatttttgttaaaattaaattgtttggtataagttggtaagtaattattttgttgggagagggaaggaagagtaggtgtagttttagattaatttttttgtattgttttttttagatggttaagttagttgtgttttattgaaaagggtgtattgtttatgtttgaaatgtagttgttgggggttgagaaattatttttatttggtttgagggttagggatgtaggagtgtagtagtgtggaggggttttgtgttggtttggtgttgtttgtggttttgtttttgttttaagggtatggtgttggtatgaggatattgatgttgtggtgtaattgttgttttttgtagtaattttggagtttggtttttggttgttttttggttttgtgtaggttgtttttttttgatgtggagttttattttgttatttgttgtttagatgattttataaataagtttttgaagtgtggaggtaggaggtggggtgtagtgtgggggtaggaggtgggttagggttagggtagaggttgtggttgtgtgtttttattggttgggatgtagtgagttgtttggagtttggtgtgggtggggtttgttggtgtgtgtttgtttatatatttgtgttggtgtttgttttttgttttttgtgtttgttttgtgtttgttttaagttggttgatggagtttttaaagtgggttgttggttgtgggagttttatatttgtgagtggattgttatatgggtttggtgtttgttgtgtttttgttttagtgtttttgaggtggttgtataatttttggtagtgttttgagattgtatggttagtttagtttggtttttgattttttttgatttttagtatttgagttatttttttttttttttgaaaatttagaaaagtgattttttttttagggaaaaaggaatttgggtttttttttttttgttttttttttgggtttgatagtttttatttattttttttttggattttgtttttgtgtgtaggttttttttagttatttttttttatttttgtttttgtatttagtttgttgtgtgttattttttatttgattgtgtggggtgtttgggatttgtgtgtattttggatttttattatttgtttgggttgtggggagtggatgagggttatagttttttatttgttagggagtttaggtgtttggtgtttgaatgttttaaagggttatagtgataatgatagttgataaggagaagaaaaggtaagtgggtgtttgggttgattagggggttggtttgaggttagggttgggttgtgtggggtaggtgtgattgagagtggttgggagaagagtgttgagaggtttttggagtttgaggtttggtttggagggttgtgagggggagagtatgtgtttggtttgggggtgtggattagtagttttgtagtggagatttttgtggtttggaggagttggggatttgtgtgtatggtgaggttaggaggttgagggagatggtttggaggttggaggtgtttttgtggtgtttttgaaaattttttagttgttttgtagtagattattgtggttattggtgtttggaaatgtttgtgggtgtatgtttttgattttttttggttttttattttggggtagtatttatgtttttatttttttttggatttgtggagtttttttaaatgtgtttttgtgtttgtgttgtggtttaagtgggtaaaggggggtgggaggtggagagtggtttagggatatgattttattgaggagttaggattttttagagtgttttgttgttgggttttagattttattgaaggttggagaatttatttttttgtgttgtattttgattttggggagagtaggtagtgagtgatttggattgttttgtgggggtagatggtttggtgtgtaggaagtggatggtaatattggatgtttttggtaggtttgggtgtttgtttttgaagaggatagagaagggtagttatgatttgtttgtttgtttttgtgagttttttggtattgggtgagaggtaattttggttattttttgttgtttttttgtttttttttggttgtttttagtttagttgggtttggtgttatttgagtgagggtttgagttttttgtgtggttgtgtagaagtaggtagggttttaatttttgtaaatgtgtgtggtttgttgtttgttttttttttttttttgtttttatttgtgtggttttagtggtttggagtttttagttttgtgtttggttgtggtttggtgaggttatgttgtgggaagttggaatttaatgtgtggttggttgaattgtttgagttgtgggaaattagtggtggagtggtggtatagaggtgtgaggatgaggaggattgatttgttaagggagggaggtgattggttgggagggtttattgttgaggttgatttgtttttgttttaatttttattatgggattggagttagaaattgtgtattttttggttgaaagtagtggtttttattttggggtattgataaggatttgataaatgggagtgaattgtgtttgttttggtttggtgtttgggttttttattgtgggattgttaggggaggggattgggttttgttttttttttttggttgtagtttttttttttttgttattgttgtgtttttagatttaagataagtgagggagttttgagattgtagttggtatatttttagggtttttggagtagttttggggttttatgttttttgaaggtagtagagtaaggaaaagatttttaagattttagtgtgttttgtaaaaattaattataatgttaataatgattgaattattgaaaagtaaagttatagatagtgtttgtagatgtttttgggtttggagttggggagggaatttgtgtattttataattgtgatgtttattgggaatgtggtaattgttgaggtggggtttgatagtaattttgataaatgtgtgaagtgttagttttttttgtgttttttagtgttgggttttgtgtagttttgtattgtatatattgagaaatttgggagtaggggaaaaatgattttgatatatttagttatagtatttggtttgttagtggattgttggaaagagagaagaagtgggaatgggagtgggaagaatgttgtgtaattagatttttaattattggtgagagtggttgttttaagaattattgtggggattgtttgtgaaatgttttggaggttgttgtgtgagttgtggttttgggttggtggttatgtgagggtgtttgttttttttgatttgtttggatttttgtgttgtagaatggtagggtaaatagtgtgttttttattatttagagttttttaaggggttgtttaatttttattgggttaattagtttgagatttatttattttttgtgtttgg

SEQ ID NO: 272 - DNA, 5465 bp, Artificial Sequence
  chemically treated genomic DNA (Homo sapiens)
ttaggtatgaaaagtaaatgagttttaaattgattagtttaataggaattggataattttttaaggggttttagatggtgaaggatatgttgtttgttttgttattttgtagtataaaaatttaggtaggttgaagagggtggatatttttgtgtggttattagtttggagttgtagtttatatagtggtttttaaggtgttttgtaggtagtttttatagtggtttttaaagtggttgtttttgttaataattgggagtttaattatgtaatgttttttttgtttttatttttgttttttttttttttttaatagtttgttaatgaattaggtattgtagttgggtgtgttgaaattattttttttttgtttttaagttttttggtatatatggtataaaattgtataaaatttggtgttaaggagtgtaggaggagttgatattttatatatttgttaagattattgttaggttttattttggtgattgttatatttttgataggtattgtagttgtaaaatatataagttttttttttggttttggatttgaaagtgtttgtaggtgttgtttataattttgttttttgatggtttagttattattagtattatgattggtttttataaaatgtattggaattttaagagttttttttttgttttgttgtttttaaaagatatggaattttaggattgttttgagggttttgggaatgtgttggttgtagttttagggtttttttatttgttttgggtttgagggtgtgatggtgatgagaaaggggggattatggttaggaaaggggagtagggtttaatttttttttttagtgattttgtagtgaagggtttgggtgttgagttaggataggtgtgatttgtttttgtttattaaatttttattggtgttttgaggtgggaattgttgtttttgattggaggatatatggtttttggttttagttttgtagtggaagttggaataagagtaaattaattttggtagtgagtttttttggttagttattttttttttttagtgagttggttttttttatttttgtatttttatattgttgttttgttgttggttttttgtggtttaggtggtttagttggttgtgtgttggattttagttttttgtagtatagttttgttaagttgtggttaagtgtggggttggaagttttaggttattggggttgtatgggtggagataggaggagaaaggggataggtggtgagttgtatatatttgtagaagttgaggttttgtttgtttttgtgtggttgtgtagagggtttgaatttttgtttgggtagtgttgggtttggttggattgggagtggttgggagagggtgagagggtagtaagaaatggttagagttgttttttatttagtgttgagaggtttgtgagggtaggtgggtagattgtggttgtttttttttgttttttttggagatagatatttggatttgttagggatatttagtgttgttgtttgttttttatatattgaattatttgtttttgtagggtaatttaggttatttattatttattttttttagagttaaggtgtggtatgaggaagtgggttttttaatttttggtggggtttggagtttggtagtggggtgttttgaagggttttggttttttggtaggattgtgtttttgagttgttttttgttttttgtttttttttgtttatttgggttgtggtgtgggtataggagtgtatttggaaggattttgtgaatttagagaaaaatagagatgtggatgttgttttaaaatgagagattagagaaagttgaggatatgtatttataaatatttttaagtgttggtggttatggtaatttgttgtggggtggttgggagatttttaaaggtattgtggaagtatttttgatttttaggttattttttttggttttttggttttgttgtgtgtgtaaatttttgatttttttgagttgtagaagtttttattgtaaagttgttgatttgtgtttttaaattgggtatatgtttttttttttatagttttttaaattgagttttgagttttgaagattttttagtattttttttttaattatttttggttgtgtttgttttgtgtagtttggttttggttttggattggttttttgattggtttggatgtttgtttatttttttttttttttgttagttgttattgttgttgtggttttttgagatgtttagatgttgagtatttgggttttttggtgggtggggggttgtggtttttgtttgttttttgtggtttgggtgggtggtgaaggtttgaggtgtgtgtaggttttgagtgttttgtgtagttaggtggaaggtggtgtgtggtgggttaggtgtgggggtgggggtggagaaaggtgattgggaggaatttgtgtgtggaggtggggtttggggaaggagtgggtggaggttgttagatttgaaaagaggatggagagaagggaatttaagtttttttttttttggaaaaggagttatttttttgagtttttaaagaaaaaaaaaagtggtttgaatgttgggagttggaaggagttggaggttgggttgagttgattatatagttttaggatattgttgaggattgtatggttgttttaggagtgttggggtggaagtgtagtgggtattggatttgtgtggtggtttgtttgtgagtgtaaagtttttgtggttggtagtttattttaaaaattttgttggttggtttggggtgggtatggggtgggtgtggagggtggggggtgggtattggtgtgggtgtgtgggtgggtatgtgttggtaggttttgtttgtgttgagttttgggtggtttattgtgttttggttaatggggatgtgtggttgtagtttttgttttgattttggtttgttttttgtttttgtgttgtgttttgttttttgtttttgtattttgaggatttgtttatgaggttgtttgggtggtgggtagtggggtgggattttgtgttggggagaggtagtttgtgtagggttgaggggtggttgggagttgggttttgggattgttgtgggggatggtagttgtgttatagtgttggtgtttttgtattggtgttgtgtttttggaatgagggtaggattgtgggtagtgttgggttagtgtggagtttttttatgttgttgtgtttttgtgtttttggtttttgggttaggtggggataattttttggtttttagtggttgtgttttgggtgtgggtgatgtgttttttttggtgggatgtagttgatttgattgtttgggagaagtagtgtaaggaaattgatttagggttgtgtttattttttttttttttttttagtagggtggttgtttattggtttgtgttaggtggtttggttttggtggggatgtggtagaggaggttttttgagttgtttgaggttggggtgagtttagaattggagaagttagtttggttttttagtgtgattttggagtgataagagttggttatgtgtttttaagttattgtattttaggtttgttttttttgttgttagggttgatggaagttttgggaaatttaaaggttataggtgttggaaatttgtagatttaagggtttatataggtaatggttagtgtttagggattttttagtggtgtttttgatgttgttttttatttttgggtttagtgtttttttgttttgtgttgagttgttttttatttgttattggtgatggggaagggatatttggggagaggataggggatgtttttagtttttgaaggttgtggaaggatttatgagttttataggtgtaatttgaagttggaaagtgagggttaaagaattggtttatatttttttttttagttttttgttatattttatattagaatgatttatagaagtgatttgaagagaagggtaggttttagtgttataataaaaatgaatatgtgttttttttgtgtatatagaaagggttgggggagatattttttaggagtttggagaaggtgaagtggggagagggtaaaaattgatgaagaattgggaaatattttttttttttttttgagattgagttttattttgttgtttaggttggagtgttgtggttttattttgatttattgtaatttttgttttttgtgatttttgtggtttagtttttggagtaattggaattaaaggtgtttattattatttttagttaatttttgtatttttagtagagatgggagttttattatgttggttaggttggttttaaatttttgattttaagtgatttgtttaatttggttttttaaagtattgggattataggtgtgagttattgtgtttggttgggaagtagatgtattttgttatttttttagattttggggtatggagtatttatataggttgatagttaatgaatttaaagattgtaaatttttttttagtgaattattttatggggttggtgggttttaggaatggggtgatttggtattgggtttttttagttagttatttttagtggatatatttatgtattttaatgagtttaaattggtagatagtttttttttaattataggtttattttttttatttgggattagagtgtgggaaaagggtattttggtggtttttaggtgtttatagtagtttattataatagtttttgagttttggattgtgtttgatagattgaggtaatatttttaatttatagagaatatagttttttagattttgtttttaaagaggaaaggtaaggaggggttatttaagattatattaatttaagaagatatggatatatgggaggaatagtatagattggggtgtgttagagggtgaggggtgggaggagggagagtattaggaataatagttaatggatgttgggtttaatatttaggtgatgggatgatttgtgtagtggattattatggtatatatttatttatgtaataaatttgtatattttgtatatgtatttttgagtttaaatgttagaaattttattaattatgttatatagttttttttttttggttagattgtattttataagtgaaggatttttaggttaatataaatagttggtattgagtttgggattttttttttttttttagataattttattttgttgtgtaggttggagtggagtggtatgattttggtgtattgtaatttttatgttttgggtttaagttatttttttgttttagttttttaagtagttaggattatagatgtgtattattatgtttggttaatttttgtatttttagtagagatggagttttgttatgttggttaggttggtttggaatttttggttttatgtgatttatttatttgggttttttagagtgttgggattatatgtataagttattgtattttgttaagtttggga

SEQ ID NO: 273 - DNA, 22169 bp, Artificial Sequence
  chemically treated genomic DNA (Homo sapiens)
ggatgtgttagtttttttttttggatttgatgaggtatgaatgtatttttaataaagttaggtttttttgttgtggttttttgggtgggtgtttgtggtttgggttatgagttatgttgggtaattttattatggggaagagggtaggaagttgggagttattgtttttgtgtttggttgttattttggtatgagggtgattgttggttttgttttgtttttatggttgagggtttttgggatgtggtgggagatgggggagtttattttttaaatttggtgtattttgtagggttgttgtatttataaaaaggttgattttatataggatttgtttttttgggttttggtttaggttggggtgagattggttttttgtgttatttgtggaagagtttgtttagtaaattgatagtgttaatagaatgttaagggggtatttatttagttttaaataattaatttaagttttttagagatgtataatggattttgaggttaggggattgtgtagatagggttgatatttgatgataaatttttatttgttaattagagtaaggttggggtgtgttattaattttagtgttaggtggagtagaaggaataatatgattattttttggggaaaaattttaattagtaattaaggagttggtaggttttttattgggtgagaatagtgtttatttggtgtttattagattgaatagttttgtgtaagtgaggttgggtgagtgttttgtggttattggtttttattgtggtggtaggtgttgtgggggttgggtttgggtagtatttgggtttggtttgatttggagatgtttttggtagtggttatttatagattgtgattgtgaggattttgatggggttgttgtgtgtgtttgggaattgtaggtgtggatgttagaggtaaagttttttttgtgtatgtttagtatattagagttttttagtttttttttatagagtttttagtttttttttatagagtttttagtttttttttatagagttttttagtttttttttatagagtttttgagtttttttttatagagtttttagtttttttttatagagttttttagtttttttttatagagtttttaagtttgtttttatagagtttttagtttttttttatagagtttttgagtttgtttttataggttttattggatattaggttttagatttttttttaggaaattgtaggaattatagtagggtagttttatagatttgagggaattgttgttttatttttgttttatagagttttggtgtttgggttgtagttgaggttgaggggttgaggatttggaggatgggattttttgtttagtgggtgtagttaggtgggaggggttaggtttttagggtttataaggttttttggggatttatttgaagttattgttttgtattaggtagggtgtgtggagagggttttgtttaattgtgtgggtttaatttggagtgtagatggtaggatgtttttagttttgggtttttgagtttgtgagtggggggtttagaggtgaggtttttatagaagttttttttttaggggtaatgggtgtagggtaggtggggagtatttaggattttttttaggggtaatgggtgtagggtgggagtgggtggaggggggagtatttaggattttttttggggtaatgggtgtatggtgggtggaggggggagtatttaggattttttttaggggtaatgggtgtagggtgggtggagaggggagtatttaggattttttttggggtaatgggtgtagggtgggttggggggagtatttaggattttttttaggggtaatgggtgtagggtgggagtgggtggaggggggagtatttaggattttttttggggtaatgagtgtagggtgggtggagaggggagtatttaggattttttttaggggtaatgggtgtagggtgggtggaggggggattatttaggattttttttaggggtaatgggtgtagggtgggagtgggtggaggggggagtatttaggattttttttggggtaatgagtgtagggtgggtggagaggggagtatttaggattttttttggggtaatgggtgtatggtgggtgggggggagtatttaggattttttttaggagtaatgggtatagggtaggggggtgtattgaggatattgttggggagtttttttttttagaattttataggttttggagatatattgaaagtaattttaaaatgttaggattgtttataattgttttgtattatttttggggtaattaggtattttgatgttaatatgtatgtatttttttgatagggagaagttttttagttgtttgtagatagggttttgttgttaagggttattggttggtttggtgttttgtaggggatatggtgtttttttgttttaagggtaatttggagaggatattatttgtgttttagagtgaggggttaggtttttagtttttttttgttatatgggtttggatttaggttagggtatagttagttattttaagttgattttgagggtttagggggagaagtagtttggagttaattatatagagttttgtttagggaagggaaggttttggagtaggtagattgggtgggtgggggttgagatgtttgtttgttttatggatgtgtttaaagttttattgttttttgttgttttagttattgttgtttttttggtttggagttttttgttgttgattttgttttagttagtgtggaagttgttttgtggtgggttttatttgaaagttatagtaggtgtatttagatggggttttatagtattgattttgtatataggaggttatgaaggttgtagtgattatttttagtttgtggttaagtttgtttattttgtggtttggtttttaaggggtatgttttttttttgtttaggggggtttgtatttgttgtgtttatttatattttagggtttagtatgtagtagatgtttaataaagattttttattttgtatttttatagtattaggtgtgtggatgtttagtgattgtggttttattgtgtgttttttgggggttaagggatgttgaatagtttggtggttggtatgagtgaggtttagggataggttgtgagtttgttttggagttttgagtaggataggggttgtgggtatgttagtttattttataggtttatttgggaatatgttaggattttttttagggggttttgtggttgttgggtggttgtattggtttagagtgagtgttattttttttaggaagttattttggatgtttttttaatatttgttttttttggattgtttgggagttgggatgttggggtttatttttggttagtttttgatgtttttggaggttaaaatgtagtttttagaagaatgtagttttagtttatgtgtgatatggatgaattttaaatatattatgtttagtgaaagaagttaggggtaaaagattatttatggtataattttatttataggtaatgtttagaagaggtgaatttagaggtagaaagtgggttagtggttgttaggggttggggtagttagggtagagtgatagtatttgggtatagtttttgttttgtgtagtgagaaagttttggaattagatagtggttgaatgaatttgtgaatggattagatgttaagtaatagtatgttttagtttaaaagttatatttttagtttggataatatagtaagattttgtttttgtaaaaaaatttaaaattagttaggtatggtggtgtatatttgtggttttagttattttggaggtggaggtaggaggattgtttgagtttaggagtttgaggttgtagttagttgtgattttattattttattttagtttgtgtgatagggtgagattttattttaaaaaataaaaaagtggttatgtatagtggtttatgtttgtaattttagtattttgagaggttaaggtaggtggattatttgaggttaggagtttgagattagtttgattaatatggtgaaattttgtttttattaagaatataaaaattagttgggagtggtggtatgtgtttgtagttttagttatttaggagtattgtgtgaatttgggaggtagaggttatagtgagttaagattgtgttattttaatttagtttgggtgataaagtaagattttattttaaaaaataaataaaaaaaggtaaattttgtaatatgaataagttattatttagaatttttttatatatatatttatttttaaattagtttttagttttttttgtttttagggagtagggtggggtggggtagggttataaggagaatttaattaggtaattttggaaaagggtttttttttatttttttatttttgtagttattgttttttttttagttggggtgattattgagtttagtgtaggttttgttgtagggtttatagttattattatgtttttagtttgttttagggttttgttggttgtagttggaaggggaattatatatagatggggaaattgaggtttagggaggggatagtgtggggagtatagtaaattagagttagttttgttttatagttttttggagttttgggttttataggagaaagtgttagtgttgtttgggaaatttgaggttgttaaatgtagtttggtttataggtgtgatgttttaaagttagttgtttgttaaagttgttggtattttttttttagtttggggaaagatttggaaagttttggatatgtttgtatatgaaggtgaaagttgatgttagtttgttttagatttttatgtttttgtagttatagtttttttatttgtgtgttggggatgaaaattgtattggtatatttggagggtgggtggttgtttgttagggtttttatgaggttgggtaatagtggtgttttgagtgtggagttgttattgttgtattattgaggaaggtaagttagatgtttaattgattttgtaaagttatatttttttattatttatagatgagatatgaaataggaaaggttttttttttatagtaaaagggtgtagttttttggtttggtttggaattgtttagtgggtattggtggttgttgttgtttattataggtgtagggaatgaggaatgaagttagttttggtttttgtggggtttttagtttgttgtttgtatttgggggtttttgtatttagttttgttttgtggaagtattttttttggtgtattgtttgttttgttttattttttttttgttagggttgttgttttttttttttttttttttttttttattattattttttttaatggaaaatatgttggttgttgtttagaggtagggtttgttttaaggagttagttttttttagagtattttaggtttttattttagtttttgttttaggtttttttgtttttgatgtttttttagtttgagtaggtgagattttttatttgatattgtgtggggttttttttgttgttttttgtttttttgagatagagttttattttgttatttaggttggagtgtagtggtatgattttagtttattgtagtttttgttttttgggtttaaaggatttttttgttttagttttttaagtagttgggattataggtatatgttattgtgtttgggtaatttttgtatttttagtagagatgggggttttgttatgttggttaggttggttttgaatttttgattttaggtgatttgtttattttggatgttgtatgtttttaaatatgtttttttaattttggtgtttttgaagattaggttttgtataaataggaggttttgttataggtttttttgtttagtttagtatgaggaggagaattaatttgttttttttttggttatgtttaagatgaggtaggtgatttaatggaaagagttagattgggtgataggagttattttgtttttttttagttttttaggttggttgtagggttaagttattttttgtttgagttttttttttttttttttaaggggaagttatgtttttagtttgtttgtagttgggaaatgatggggtagtttaggttggttggggttgtgtttagggatatttgtttgggagaaggagaggggtagggttagtaggaattttgttattgttgtgtgattttggggttgatggtgatttttttgggttttttttttttatttattggtgtttgatttagatagttttatggggttgttgggagttatgttaggttattattgggttggtatatttttaatatgttttatatgtgagttaggtgttttttttatgttttgttgggaagtgaattttataggagtaggggttatgtttgttttgtttttattgggggtttggtttggagtagaatgtagtatatagtaggtgtttaaatgtgtttgtgaattggagttattttgggagatggatttttttggagttggagttattttgggagatggatttttttagagttggtaagtttttttttaggtagtgttaggtttagtttattaggtagtatttttaggattttttgaatttatttgttaattaattaaatatttaggaaggaggttttggaaattagtattgttagttaatggggagaaggtggggaagaaaggagtgttgattaggtgttttttttatatggtttttatgtaatttttatatattattaagagatttagtgtgtattagtttggttgatatgttggggaaattgaggtttgtatgatttgatgatttaaggttatagagttagtggttaggttaggttttagatatgaggttgtttaaagttaaagtgtattatttagtaggtagttggatatttttttggaggtgttgggtgtgatagtttatttttattttttttagtttttggaagatgttttgtgttattttgattttgttgttagtagttaatattttagttgttttttgttttaatgtttagtttagatgtaggtagttttgggagagtgttttagattaaggatgtagttttatttagatagatagggtttttgtagttttttttagttttttttaaaataaagagaaaaaaggtggagttttttttagtattttttgtttatattgatggagttgatgagggggttagagaagagttaagggttatagtgattttttgggtttgtttagaaggttattatttttgattatagttattatggttatattttgtatagtagttgtttagagattaattattttttgtttattagtatgtgttgttaggtgttttttatttggttattggttgattaggttatggtgatattttgattttttgggaaggtattttgtattaataaaattattttttttaattttgggttttgtaattatttgattggtagtttttggtgaaggttttttttttttgggatggaaagaaatgatttatttagtattagtgagttaggtattgtgatgtttattatgattatgttttttttatagtggaggtagtaaatggtattaaaagttaaagttttttttggggttatagttggatattatggggttaggatttttatttaggttggtagggttttaagagtttgtattttagatttttttgagaaatagtgtgggtttttttttttgttgggggagttaggttttttgtaggtgttttggttaatttttggatagattttttgggttttttgagaaggatgggtaggaatgggaaggtagaggtatttgaggggtgtatgttgggtggggtttaagtttagggagggagtttggggttttttttgaagtggttgtaatgttttttagattgttgtgtgagttttgatttgtgtttttataagttgggtttggttgtggttttggtttttaattttgtggtttagaagtaggagtttgaggatgtgtttttgttttatttttttgttggatttgtggggtgtgtataatggggtttttgtgggttgagtttggttgtttgttaggttaaattgaagtaggttttttgttaagaaggagggggtgttaggttttagtaaaggggataaggttaggtattaaagttatggttggtggtttgttttgggttggaaatagtttattgggattttaggtttggggaatgggaaagtgggtttatgatattagtgttttgtggttttgtggtagggttttaatttagatattagggagttgtagtaatttgtattttaaagtatagtgttttggtttagggagattttagttttagatttttgtgggttaggttgtgtttattttttggtgttattgagaagaagtaataggtttttaatttttttagtatggtgttttttttatttttttaaagttttttgtaggagtaagaagttttttttagagttttgaatgggtgagaggtaaagtttgagttgggagtgtagtggtggggaagggggttatatattttgggaagttatgtataattaattatatggtattaatttgttttttttaataatagttgttgtattttttttggattttagttgttggtttttgaatgaaaggaaataagatttagggtattaagtgtttgtgtggtttttgtagagggagaagggggttttaaaaagtaaaaaaaaaaaaaaaaaaaaaagtagtgtgtatttattagtgtttgataaagatataattggttttgtttattaaattgtttatagatttgtttaattggttttagtttggggagggtgggggttggggagggagggggtttgttgtttataggttgggtagttggtataggtaggagttgggttggggttgttaagggaatgggattttttgtagttggaatgagggtgtgtagattggttggggagttatttttttatttgtagtttttggggggtggagggaattttttttttagatattaaatatttttttattatttttattagggatggatttaagttgaagggtattggttatagtagaatagttttttatggttgatgggtatttataggtaggtaggagggagtggttttgtatgattttttggtttttttagtgtttattttatatttgaggttggtagattagaagggttatgggattttgaggttagagtttgtagatgttaggatagaaattagatttaataattattttatattttatgttaaaatatgagttttatttttttttttttagttttagtttgaggttgggaagagggagttggggtaaatagagagtttaaaggtgggtttgattttgaagagttaattttttttgaagaggtattatttatttggaggtggtattatttgtttaggaagtattatttgtgtttagaggaggtattatttgtttagaggaggtattattatttagaggaggtattatttatttagaggaggtattattatttagaggaggtattatttatttaggaggtggtattatttgtgtttagaggaggtattatgtatttagaggaggtattatttgtttaggaggtggtattatttgtgtttagaggaggtattgttgttagtttaggaggtattatgtatttagaggaggtattatttgtttaggaggtggtattatttgtgttagaggaggtattattattagtttaagaggtattattatttatttaggaggtattatttttgagaggaggtattatttgtgtttaggaggtattatttgtttagaggaggtgttttaagttggtagggtggtgggggttgggttttttagtaaatggtttagagttttttttggtagattaattgttttttggggatttaaagaagaattggggtattgggatttttatttagtgattttggagtttgaggtggtttatggaggagtgtttaagtttttagtagttagattagttttatatgtagtataattgttggtgattaagtaattgttagattttgtttaataaaagttagtatgtgattgtgtttagattttgggttatttttagaagataatggtttagtgttttgttttttgtgtggttgtagaaggtaggggttttgtttttgataaagtaataggttttgtaggggtggtatttatatgtaggtttttgtgttattggttgttttatattttttgttatttaggtaggttttattgggttgggagtattgtgggtttaggtaggggtaggagaagagaggttagttttatttgtattattattattgaaggttttggttattttgggggtggggatttgtatttagttaaggggtattgtttgttttttattttggatgtattttgtttagtattatgggttgttggggtatgggtttgtaggaagtttttttatgaaattaaaggggtgttaatattttgtttagagttttgtagttagaaatggggggaaggggagtagtagggaatatgttttgtttgaagtagggtggggtggtttgatgtgttgtttggatgtagtgggggaaaagtagagataaagtgggttattttttaaagtgttgttttttattttggaggtttattgaggagtttggtagggtagggttttttatttagttgttgagattgtttttgtttaaatttgttttgtaagggggtagagttggatggggggagggggggtggttatatttagtttttgtttgtgggaaaatgtgatagttgtttgtttgttattttgtttgttaataaagtgttggtttttgttttagaattagagtggtttattgtggagttggggttgtttttaggggtattgggatagtattttggggatgtggttttgtttttgttgatatttaatatttgtttttgtgggtgtgtatttttagggtagtttttatatatttataggagggggatgaaggttttttatttggaaggaatttgattttattttgagaagggattaattatttaagtttttttttttttattttattggggttgagaaatgggggaggggggtgtgatatagagttgtattttttggaagaggatagataatttttgtttttaatttttggagaaagagtggattaattatttgattttttagagattttgtttgttgtgtggtggggagaaatgtaagagttttttatttgtgttttgttttttgtttttaagttttttaaattttaattttgtaaagtaaaaggaaagtttagtttttttgggtgtggtggttttttatgtaattttttttttaaattgagagttgggttggggggtattggtgggtggggtgattgggagtttggggatttagtttggttgtgtgggttagtgaaggtgaatgtggtgttgtagagtttatattttgtgttttaatatttgttttggtgtgggttagaggtgaagaagaaagaagataaatggtttggagaagtaataggaaattaaaattgattttatttaaattgaaaaatagtaggtagtttgtttgtttggttgattggtggtaagttttatgtgtggtgggtgaagggtgggtttggagtagggtttttggggttttagtattttatattggttttttaatttggttttaggtatgggtggtgtgagtttgtttttatggggggattgagggggaaggttggttttttttgattttgggattttagaattttatgttttgggttgtttgtttttttttttttatgttggtttttttgttgtttgtttttagttgtggggtgtgtgtgttgggtgttgttaaagtttttaaagggtgtggaaagtgggggtttgtgggtgggtgggtgtttattttgtgtggtgagtgtgggtagtagtgttaggtagagtaggggtgttaggagtggtggtatgtttttttattggttgttttttgtgtttgggtggtggttttttgtgttggttggtggggttgggatgtatatgtgtggtgtatggttttggggtggtggtggatggttttgtttttttttttttggttggttggtggtgttgtgtttttgtaggtttttgggtttggttttgtgtttggtttgtttttttgttgtgtttgtgtttgtgtttgtgttttgtgttttgtgtttttgtgtttttttttgtggttgaggtattagtgaggtttagagttgaggtgtgttttgtttttgttggttttgttttgtttggttttatttttgttggtttttttgttttttttgtggttatttttttttgtatgttttgtttgtttttgtgtttttttgagttgagttgtgtgttttgagtttagtttttttggggaggagggatttggtggtgtggtgtgggttgggagtgggtgtttgggattattttttgtttgaaagtttttagaggttaaaagtttgagttggggttgtggaaggatttggttttggtggttgttgtgtttggtgataattggtgattgaaatttgtatgtgaataagtggaggagtttggggtggaatggggagggtgaggttgtggatagttgtgtgtattgtgtgttgggttgggtggggagtagttgaggttatgttgggggattttgggtttggggtagggttttgggagagtggtttagttgtgtgtgtgtttttagtttagtggttttatttttttttgagggttttgtggttgtggttttaggtgtttagaggattgattgttgttagatatttttggttgtgattgtttgagtatttgattgtgagggatgggggtgttgtggtttttgggtaggggattttgggtgttttgagggagtagttgggattagtgttttgtggatggattgtgttttgtttttttaagggggatttgtgttgatatgttttttggttattgttttttttttgtttgggtgttgtttgtttaaggtggttttagaaagtataaatgggttgggtggatttgttgttggtgttggtgtagttttttttatgtgttttttttggttgatttatttttttattatgatgttaggtatgggtattttgtgttaagtttggttaagtgttaggagtttaaaatgtttgttatagtttttgtgtaaagtttatggttttgtgttagggatagatagtgttttttttttattttaatatagggtggtgagtgtgatggtagaaggtgtgtgttttggtgttttttttggagtaggagggttaagtttgttttgtggggagattgaaaggttgggagggatttaggattgtgggggtttggggggagggttgtagaaattttagagtatggtggtagaggtaggtatagaaagtaggataaattttatatttgattttagtaagttttttttggtatattttttgttaaatgttgagtattttggaaatagttagtgtaggtggtttgttttgtttttgtagttgttgttgggagttttttttgtttgtgtttttttagaatttggttttatttttgtaggtttggggtaatattttggggttagtgttttaggagaggaggtgtttggaggtagtagagatgtttatgtaatagtagttaggtagtttggaggagtagattttttatagaaggaagtgtggggttgtgtagtttttaggttgaggattttgtttattatgatgttttttgtttttggtgggtgggggtggggtggggtatagggaggtttgaaggttttaggtttggtgttgattgggtgtgggtgtgattgtttgtgtgtttttattggtatttttgtttgtgggttttaggttagaagtaatggtttatgtagtttaggtttgggggttagtttttagtattttgtggaggggtggtttgggaggggaggaggggatttttggatagggggttttttttggtttgttttagttgtgttgatagtatttttattttgggtttttattttttattagtagagaagagagtggtttatttggtgtttatttgttaggttatttagtagttaggtatgtttataagtttgtgttatggatggtgtggttgggtgtataggtttgagggaagtataggttttggttttttagtttttaatttttgtattatttatagttgggagtattttatggatagttgtggttgaggagaagttagggatgagggggatgggttttatttttttattagtttgggaagggggtaggtttttggtaagtaggtgagaagtttttttatttataagttgtttgggttttttatttttttttgttaggttagtgggtgtgggtagttgggggaggttggggttttgatataataggagtatatttgttggtttagggtttggagatttttttttataggttgggaggtagttttgggtagtgggtattgtggggattaaagagaaataagagtaggttgtgtgtagggtattttagttattttagaaatttaatgggagggtgggggttaggattttaagaagttgaattggggtgtagtgttgttaggttttttttgtaggagttattttgggttttttgttttaatttgtggtgggagttggggtaaggttttaggggtattttgaatgaatggggttgtttttaagttggttagggagtttggaagtagatgagatggggttgtagagtttggtttgtggaggggagaggtagatgtgttttgtagtttttttttttttagaggttttttgtgggtgttgaggggagagtggtttaggtgttgtattttaggagattgaattgggttagtttttttttgtttgttgttagagaaatgggggtattattgttagggtgagttaaggaggttttgttgatattggtttaattaggttttttttttgtggttgttgtggggatttttgagagtagagtatatttttaagtgtgtggagaggtaagtatagttggtgagtatatggggatagtgatggagtttatggagatttaggtgattttaaaatattttagggttggttttggttttagagagatgtggtttgagtagaggggggttagtagtgatttggtgggtgggtgtatttgaggggtgtttgtgttgaaagttttgtagtagattttaaggagtagttagggttgagatttttggtgttgagtttaaggttttttttttttttgtaggagtttattttggtttttgtagtttttatgattttgtggtgttggggggtggttagtatgatgttttttattttttaggagggaagttgaggtttagagatattatgaggatgttagtttaaggtttagttaggttttggtttttagttgttgttatttagtagggtaagtgggatttttaggaggtgttgggggatatttttttttttttttatatttatagtttgtttattgtttaaggtagtaggttggatttggtgtagggattatggtttggtgtggttaggttggagtggtttttgggattgaaagtagggggtgtgggggttttgaggtggggttgagtgtggggatgttttgtggtgggtattttgttgggttttgggtgggggttattattaggtagttgtgggaatattttagattatttaggagtagggtttttttattgtttgaagttgattgtaaaaaatatttgatttgtgtgtaaagtttaagtttagaggtttttagggtgtttagtttttagggtgttttttatgtagtttttatgtttttatttattgtagtttttgattattgggtatattgtggggtttttgttggttgttgggttttaggttttgttgtattaagtgatttttaaagttttatttgtttttttttatttataaagaatttgggatatttttttgaggttgggtatttttttagatgtggttttagtgttttgtttgttatttggttttttgtgttgggtggtttgttgtgatgtatttggtagtttttgttttaggatggatttgggttggtttttgttttgagaatagagaatggtttttgttttgaggaggttggggtttggaatttgttttttggttttttgttgtgtgtagatagttattgttatttaggtttaggggtgtttgtaggtgttgggtattttattttggtttttataggggttttttatgttttgtattttttggtttgtgttggggatttttttgttttgttgttgtaggttttgttttttgttgagggggttttttttttatgtgtttttgagattttttagttattttagaggtttttggttgtttgagtatttttgattatgaagtttttttggtttattttttgtgtgtgaggtagagtttatttttattattttgatttatattagaggttttggaaggtttgttgattgatttgtgattgtaagaagttgaaggaatgtgggtgtagatttggtaggggttttttttggtgtaaagttaattggttgtttatgtaagtttgttgttgtggttagtttttttgttaggtgtttggtattttttttggatttagttgttaggatagtgatttttagttgtggttaggattttgtttggggttttgtttatttagtgtttttagtggtttttatgtagaaattgttttttttgttgtttatgaggtatgggatagggttagtatttgagaggtaggttttgttgtttttttttgtatagaggttgggggagtgagttgtttgggtaagtttttgggtaggtattgggttttttgagtaggtgagttgagaaggttttagttggtgtaggttttgagagttgtaggattggttatggggtagatttggtattgttattttagagttgggtttggggggtggttggtgtagtgtagattttaggtggaggttatttgtttgttttttttatgtggtttagggtttagatttatttgtttgtttttggaagtttttagattgtttagagtatagattttagtgggaaagatagtagataggtttgggtatggttttttagttttgagaagtggggagtttatttagatttttttaggattttaggtttttttagtagtttatagagtgtgggtggagtttgggttggggttgggttatttgggagttaaaggtttatttttgttgtttttagggagttttagggagatggtagaggtagtgtttggttggggttttggttggtgtgttgtttgaggggtgtatgtattgggaagttggttaggtttgtttaaattagggggtttttaggaggagagatattaggaggatgggtatagaggtggtttagtattagggttggtatttttaggtaggggttgtggggggttggattagatagggaggttgttatgatgtttggttgttggatgggggtatagaggttttgagtggggtggtagagtttggttattaggtttatttgtattttttatgtttttttattatttttagatttttatgattttaaattatttagttttagggatttttgtagagtttgtggtgggggtgattttttattttgtttggtttttgtttattttattttagaattttttttaaaaagtaagagttttgggggatgaaattttgaggttttattttttgggttttggtataaattttgagttttttttgagggttgagttattgggaaagttgggatgggttggtttttttttttttttttttttttttttttttttttttttttttggtttttttttttttttttttgttttattttttttttttgtttttttttttttttttttttttttgttttttttatttttttttttttttttgtttttgtttttttttttttttgagggtaaaaatagttggaaaatttttttaaaaaagtttattttaattttagagggataatgttggtgttttaaagtatagttttttgttttggaggagttattggtagagttaggagtttttgaaggattttgattatattttttattttattttgatttgtgtttggtgttttaagtggagtttgggttatttttgattttattgttggggtgatggagaagtagttgtttgaggtgagagttttttaggtggttggggtttttttttatttgttttagatatatttaaataagttgagaatttttgtttttttatatttttttttgtggatttttatggattttttttgtaaatgaatatgggtttggaaattggggtgtgggttatagagagtatggggaattttgtttgtgaagtaatatggagtatgaatataagtaggtattgtatatttgtgagttatttgggtttttgggggaaggtaaaaagttttaataagttttaagtaagattaggatgtttttatagttttgttttgatagttaaggaaaaaatttgttaaaaattagaggtgttgttgagtgttggtgtgggaatgttagtttagttagagttttgttttgggttatttaaataaaaatagatatgttggtggtaaatgttagttgaatatgtaggagagtggtgttttttgggtttggagaagggtttgtagttgtatttttttttttttttttttttggtttttttagtttttttattattatgattagtattttattggtaaatatttggtgtaataatttttaaaaattagtaagaaaagtttgagtgttttatgtggttgtgattgtgtggttttagttggaagtatggatttttagtgttttttagagtttgtttttgagggatattttaattatttgagggtttttgtatgatataaattagattgattatttttagagtggagagggggataaatttatttgtagtaagtgaaggttagaggttgttttgggatggtattgtttgtttttaggggtttgtggtggtgtagtagatatggggatttttgggtttttttttttttttgttggggatgttatatagatttatgtttagggatttgaatttagagtttgttttaggggtggtgaatgtatttgggatattgaggatttttttattgggtgtattttatggttttttggtttttttttttgagatggagttttattttgttgtttaggttggagtgttatggggtgatttttgtttattattatttttgttttttgggtttaagtaatttttttgttttagtttttgagtagttgggattataggtatgtgttattatgttagttaatttttttatttttaatagagatagggttttattatgttggttaggttggttttgaatttttaattttgggtgatttgtttgttttggttttttgaagtgttgggattataggtgtgagttattgtatttggttagttttttggttttgaagggtttttgggagggttttagagaatgttttggtttttttatttttgggtttttattgattgaggttagggttgggaaggggtgatgagtttaggatttttttggtgagagtgagggtttatgttggggggtttttttttgttatttttttttggtgatatggggttggttggagagtttttttgtgtttgggagttttttagtgtagggggggaagggggttattgtaatgaatttgatattagttttttttttttttgttttgttggtagtttttatttatatggggggtgggtttgtttttttttttttaaagttgggggttttgagtgtggttggggtaatgtttggttttttttagaatagtggggtttggaatttatttaagggaagaagagtgaaggaatgtagatgttgattgtatggagtttttttgggttgtagtttttagagtttgggtgttttgtgagttagaaagagaatggttggggagagggttgtgtgaggttttgtttttttaagattgttgtggaggattgatggggtttagggattttgattgaggtgtgttgagtatagtagttttggataggttgtattggtttttttgtttgttatttgtttatttgttggtgggtaggaatagatttgatgttgtaagaagaggtttttaggattttgttttttttattggttgagtttggattgtggagttagttgtttttatattgggtatagatgattgatttaggttttgagaagatttaaatagtagtaggatgtgtatttggtaggggtaggagggttttttttggatttaaaagtgtatttgtggagttttttttttgtagtgtaggttttggggggatagtggttaggatggaggtttttgtggaaagggggagatgtgaatagtgagttttttgtatgtaggtatttgggaaagaatattttagttaagtggttttgagtatattttgattttggttattttggttttgtggattaattttggggtttaggattaatgatagttagtgtttgttggtgtttttagtttgggttaggtttgtgggttggtttttttaatgatggggtaagtttagttttgtttatattttttttttttttttttgtgtttttttttatttttaggagtgggttttaggtttgttatttgttatttatggggggttgtgggttgatttgtatttttttaaaagatttgttgtatatttttagagtttgtgagtaggatttgttttggagatgggtttttgtagatgttgttgagttaagataaggttatgttggagtggggtttgttttaatttaatgattggggtttttggtaggagagggaggtttggggagaaggtgttgggaagataggtagaggttggagatagtgtagttttaagttgggagtataggggttgttggtatttaatagaagttggaggaggtgggaaggattttttttagagttttgggagggggtttggttttgtgatatttagattttggatttttggtttttggaattgagagagtatatatttttgtggtttgaagttattaaatttttggtaatttgttttggttaggaaattaatattagggataaaggtgttttaatgtagataaagatagtttttgaattaattaagttttgtgtaaggttgttgggattgattgggggaagtgagggatttagtagtttttttgatgtttgttaggtattggtttttatatatgtttgttggtggtggttatggtaggttgttttttaggtgaaattatataatgagtagttttaagtttgttgatttatatagtagaggttgtttggtttggtgttttttttggttggaggattttgttttttttttttgtttgtttgtggttattttggttgtagaggagattggtagatgatgtttttatttttggttggggtaaaagttttgtttaaatatgataatggtgaaatttggaatagtgatagagttaatttatgattgaggtagggttggaggttttttggaaaatgtatggagaaatatgagggtttagttgtgttttgggttgttttatgagtttagttttttttgttttagttttttttttaaagaaaggataaaattattgaaagggtttgtttgggttataaatgttttaaattggtttttgtgtggaaattaaataagggtaggttttagtttttgggatttaggtgaaatttgaggtttgtttgaggttatagtgtttttttgaggatgttagttttgttggttgtgtttggggttaggttgaggtatagtgggttaggaggttgagttttttaaaggagttgtattgttttttttttagaatatgaaattaatgtttgttattttgaatttttatggataagattttttggaagttagtttgtgttagggttagtgttttttagggttgatatttatatttttgtatttttagtgtgatttgggatagtggtagaatttgttgggttttttttatgggagtgttttttttttttttttttttttttttttttttttttttttttgagttggagttttatttttgttgtttaggttggagtataatggtgtgattttggtttattgtaatttttattttttgggtttaagtagtttttttgttttagttttttgagtagttgggattataggtgtatattattatgtttggttaatttttgtatttttagtagagatgaggttttatggtgttggttaagttggttttgaattttt

SEQ ID NO: 274 - DNA, 22169 bp, Artificial Sequence
  chemically treated genomic DNA (Homo sapiens)
aggagtttgagattagtttggttaatattgtgaaattttatttttattaaaaatataaaaattagttaggtatggtggtgtgtatttgtaattttagttatttgggaggttgagataggagaattgtttgaatttaggaggtggaggttgtagtgagttgagattatattattgtattttagtttgggtaataagagtgaaattttgatttaaaaaaaaaaaaaaaaaaaaaaaagaaaagaaaaaaaaaaagtatttttgtagagagaatttagtgggttttgttattgttttgagttatgttgagaatgtgagggtgtaggtgttagttttgggggatgttggttttgatataggttggtttttaaggagttttgtttatgaggatttaaggtggtagatattgattttatattttaaggaaaagatagtgtagtttttttgggaagtttggttttttggtttgttatgttttagtttggttttagatatagttaatagggttgatgtttttgggaagatgttgtgattttagataggttttgggttttatttgaattttaggggttgggatttatttttgtttagtttttatgtggaagttaatttgggatgtttgtgatttagatgaatttttttagtggttttgttttttttttggagaagggattaggatgaagaaggttggatttatggggtggtttagggtatagttgggtttttgtgtttttttgtgtgttttttagaaagtttttagttttgttttaattatgggttggttttgttgttattttgagttttattgttgttatatttgagtagaatttttgttttgattagggatgagaatgttgtttgttagttttttttgtagttggagtggttataggtaggtagagggggaaggtagagttttttagttaggaagagtgttaggttaggtagtttttgttgtgtaaattgataggtttaaggttgtttattatgtggttttatttgaagagtgatttgttgtagttattgttagtaagtgtgtatggaggttggtgtttggtgagtgttggggaagttgttgagttttttattttttttagttaattttggtagttttgtgtaaagtttggttaatttaaaaattgtttttgtttgtattaaaatatttttatttttggtattaattttttggttagaataaattattaaaaatttggtggttttaaattgtagaaatgtgtgtttttttagttttgaaggttagaaatttaaaatttgggtgttataggattgggtttttttttaaggttttagggaggattttttttattttttttagtttttgttgggtgttggtaatttttgtgtttttagtttggggttgtattgtttttagtttttgtttgtttttttagtgttttttttttaaattttttttttttgttaagggttttagttgttggattagggtaggttttattttagtatggttttgttttaatttgatgatatttgtaaagatttatttttaaaataggttttgtttataagttttgggggtatatagtgagttttttgggggaatatgagttaatttatagttttttatgagtgatgagtgatagatttggagtttatttttgggggtggagggaagtatagaggaggaggagaagggtgtggatggggttgagtttgttttattattgaagggattagtttataggtttggtttaggttggaggtattagtgagtattggttgttattaattttgggttttagggttggtttatagggttagggtggttagggttggggtgtgtttagagttatttggttggaatgtttttttttagatgtttgtatgtaggaggtttattgtttatatttttttttttttatgagggtttttgttttggttattgtttttttagagtttatgttgtagggaaggggttttgtgaatatatttttgagtttaggggaggtttttttatttttattaggtgtatgttttgttgttgtttggatttttttaaaatttaagttggttatttgtgtttagtgtgagggtggttggttttatagtttaggtttagttaatgggagaggtagggttttgggggtttttttttatagtattaggtttgtttttgtttattaataggtggatagatgatagatagagaggttggtgtggtttgtttagagttgttgtgtttggtatattttagttagggtttttgggttttgttggttttttgtagtggttttggaagaatagggttttatatagttttttttttagttgttttttttttggtttatagagtgtttaggttttaggggttgtagtttgggggggttttatgtagttggtatttgtgtttttttatttttttttttttgaatgaattttaagttttattgttttaaggaggattagatgttattttaattatatttaggatttttagttttggggaaaggaggatagatttgttttttatatgagtgagggttgttagtagggtggagagagagggggttggtgttagatttattgtagtggtttttttttttttttatattgaggaatttttaggtatggagggattttttagttagttttatgttattaaggagaggtggtagaagggagttttttaatatagatttttgtttttgttagaagagttttgggtttattatttttttttagttttgattttagttgatgggaatttaagagtgaggaaattaagatattttttgaggtttttttagagattttttaagattaaaaggttggttaggtgtagtggtttatgtttgtaattttaatattttgggaggttaaggtaggtagattatttgaggttaggagtttaagattagtttgattaatatggtgaaattttatttttattaaaaatagaaaaattagttggtgtggtggtatatatttgtaattttagttatttggaggttgagataggagaattgtttgaatttgggaggtggaggtggtagtgagtggagattgttttatgatattttagtttgggtaataaagtgagattttgttttaaaaaaaaagattaaaaggttatgagatgtatttggtaggggggtttttagtgttttagatatatttgttatttttggggtaggttttgaatttaggtttttgaatgtgggtttgtgtggtatttttagtaaggaggggaaggggtttaggggtttttatgtttgttgtattattataagtttttgggaataggtaatgttattttagggtagtttttggtttttatttgttataagtgagtttatttttttttttattttagagatagttggtttgatttatgttgtgtaaaggtttttaagtgattagagtattttttggagataggttttgggaggtgttgggaatttatgtttttagttggggttatgtagttatagttatatgaaatgtttagattttttttgttgatttttgaaaattattgtattaaatgtttattagtgaaatgttgattgtgatgataagaaggttggggaggttaagagaaaagggaagagagagtgtagttgtaaatttttttttgggtttgagaagtattgtttttttgtgtgtttaattggtatttgttattaatatgtttgtttttatttaaatggtttagagtaaggttttgattaaattagtatttttatgttaatatttagtagtgtttttggtttttggtagattttttttttagttgttaaagtaaaattatagaagtgttttggttttatttaaggtttgttggggttttttgtttttttttggagatttgaatagtttgtagatgtgtggtatttgtttatgtttgtgttttgtgttattttatgagtagaattttttgtgttttttgtaatttatattttgatttttaggtttatgtttatttgtagagggggtttgtgggggtttgtgggggggagtatggggggatggaagtttttagtttgtttaaatgtgtttggagtaaatggggggaaattttggttatttgagaaatttttgttttgggtggttgtttttttattattttagtggtgaggttaaggatggtttaggttttatttggggtattaggtataggttggggtggggtggggggtgtggttaaagttttttaggggtttttggttttgttggtggtttttttggggtaaaggattgtgttttgggatattaatattgtttttttaagattaaaataaatttttttaagggggttttttagttatttttatttttagaaaagaagaaaggtaaagatggaggaagggaagaagatgaaaggaatgaaagaagagagggagagagggaggtaagaaagagaagtaaagtaaagagaaaaagagggagattgagaaagggggaaggaggaaggaaggagagggagggggaggggttagtttattttggtttttttagtgatttagtttttggaggaggtttggggtttgtattagagtttaaggggtggagttttgaagttttgttttttggggtttttattttttggagaaagttttgaggtgaggtgggtaggggttaggtagggtggaagattatttttattataggttttgtaggggtttttgggattgagtagtttgggattatgggggtttgggggtagtgagggggtatggggggtgtagatggatttggtggttaagttttgttattttatttagagtttttgtgtttttatttaatagttaggtattgtgatagtttttttgtttggtttagttttttatagtttttatttggaggtgttagttttggtgttaagttgtttttgtgtttatttttttgatgtttttttttttggaagttttttgatttgggtaggtttggttaattttttagtgtatgtattttttaaatggtatgttaattagggttttagttaggtattgtttttgttgtttttttgggattttttggaagtagtagaaatgggtttttggtttttaagtgatttaattttagtttaggttttatttatgttttgtgggttgttgaggggatttggggttttggaaaggtttgagtgggttttttattttttagggttgggagattatatttaggtttatttattgttttttttattgaggtttgtgttttgagtagtttaggggtttttagggataggtaggtgggtttgagttttgagttatgtggaaaggatgggtaggtggtttttatttgagatttgtattgtattagttattttttaggtttagttttagaatgataatgttaggtttgttttatggttagttttgtagtttttgaggtttatattagttggggtttttttagtttatttgtttaggaggtttagtgtttgtttggggatttgtttgggtaatttatttttttagtttttgtgtagaggggaatagtagggtttgttttttggatgttgattttattttatgttttatgggtagtaaggggggtagtttttgtatggggattattggagatattgagtagatagggttttgggtagagttttggttatagttggggattattgttttggtaattgggtttagggagggtattaggtgtttggtgggagggttggttatagtagtaggtttgtatggatagttagttgattttgtattaagaaaagtttttgttgggtttgtgtttatatttttttagttttttgtagttataggttagttagtaaattttttggagtttttggtgtgggttggaatggtagggatgggttttgttttatatatagagagtgggttaggaaggttttatggttaggggtgtttagatggttgagagtttttgggatggttgaggagttttagggatatgtgggaaagagatttttttggtaaaggatgaggtttgtaatagtagagtagggaagtttttggtatagattgaggggtgtagggtatggggagtttttgtgggggttagggtgagatgtttagtatttgtaggtatttttgggtttgggtgatggtggttgtttgtatatagtaggggattaggaagtagattttagattttagtttttttagaataagggttgttttttgtttttagaataagggttggtttgaatttattttagagtaaggattgttaggtgtgttatagtggattgtttagtataggggattaggtagtaagtgagatattgaaattatatttggaaaaatgtttaattttgaggaaatgttttaagttttttataagtggagaaaggtagatggggttttaaaaattatttggtgtagtagaatttgaggtttggtggttagtgaaggttttatggtgtgtttgatggttaggggttgtagtggatggggatgtggaggttgtgtaggaggtattttggaggttggatattttggaggtttttgggtttgagttttgtatataggttagatgttttttatagttagttttaaatggtgaaggggttttatttttaggtggtttggaatgtttttatagttgtttggtggtggtttttatttaggatttagtagggtatttgttataggatgtttttgtatttggttttgttttagagtttttatgttttttgtttttagttttaggggttattttaatttggttatgttaagttatggtttttgtattgagtttagtttgttgttttgggtggtgaatagattgtgagtgtgggggaggggaggagtgttttttaatattttttgggggttttatttattttattggatgatagtagttgaggattaaggtttggttgggttttgagttggtatttttatgatgtttttgagttttagttttttttttgaaaaatggggagtattatgttagttgttttttagtgttatagggttatgggggttgtaagagttaagatgaatttttgtaggaaggaaaggggttttgggtttagtattgggagttttagttttggttgttttttagaatttattgtagagtttttaatataggtattttttaaatatatttatttattaggttattgttgatttttttttatttggattatatttttttggggttggagttggttttggggtgttttaaggttatttgggtttttatgagttttgttgttgtttttgtgtgtttattagttgtgtttatttttttatgtatttaggggtgtgttttgtttttgaaagtttttatagtagttgtaaaggaggggtttggttgggttaatgttagtagggtttttttagtttattttgataatggtatttttatttttttggtagtaaataagggggaattgatttagtttagttttttggggtgtaatgtttaagttattttttttttagtatttgtagggggtttttgaagaagagagggttgtaggatatgtttgttttttttttttgtaaattaggttttgtggttttattttatttgtttttaggttttttggttagtttgggaatagttttatttatttggggtatttttggaattttgttttagtttttattataagttgggataggaagtttaaagtgatttttataggggaggtttggtggtattgtattttaatttagttttttggggttttagtttttatttttttattgggtttttggagtggttggggtgttttgtatataatttgtttttgtttttttttagtttttgtaatgtttgttgtttagggttgttttttgatttgtaggagaaggtttttaggttttaggttagtagatgtatttttgttgtgttaggattttagttttttttgattgtttatatttgttggtttgataaagaggaatggggagtttggataatttgtgaatgaaaaagttttttatttatttgttaggggtttattttttttttaggttggtggggaggtgaggtttattttttttatttttggtttttttttggttatagttgtttatggggtatttttggttgtgggtggtgtaggggttgggagttgggaggttgaggtttgtgttttttttgggtttgtgtatttggttgtattatttgtaatgtgggtttatgagtgtgtttggttgttgggtggtttgatgggtggatattgaatgggttatttttttttttgttggtagaggatggaggtttaaggtggaggtgttgttggtatagttggggtagattaggggagattttttatttagggatttttttttttttttttaggttgtttttttgtaaaatgttgaggattggtttttgggtttgggttatatgggttattatttttggtttggggtttataggtagagatgttaatggaggtatataggtagttgtatttgtatttgattagtattaggtttgaggtttttgggtttttttatgttttattttatttttatttattaggagtagaggatgttgtggtgggtagagtttttagtttgggagttgtatagttttgtgtttttttttatggaaaatttgtttttttaggttgtttggttgttgttatataaatatttttgttgtttttaggtgtttttttttttggggtgttgattttaagatgttattttaggtttgtagaagtgaggttagattttgggaggatgtaggtgagggaggtttttagtagtagttataggggtgggataggttgtttgtattggttgtttttagagtgtttagtatttggtaagaggtgtgttaggaaaggtttgttggggttaggtgtgagatttgttttgttttttgtgtttgtttttgttattatgttttggggtttttgtagttttttttttaggtttttatagttttaggttttttttagttttttggtttttttgtagggtaggtttagtttttttattttaggaggggtgttgggatatgtgttttttgttattgtatttattattttgtgttggggtggggagggggtgttgtttgtttttggtatgaggttgtgaattttgtgtagggattatggtaggtattttggatttttggtgtttaattaggtttggtatagggtgtttgtgtttggtattgtggtggagaaataaattagttggaaggagtatgtgggaagggttgtgttggtgttagtggtagatttgtttgatttgtttgtgttttttggggttattttaggtaggtggtgtttgggtaggaggaggatggtgattgaggagtgtgttgatgtgggttttttttgggggagtggggtataatttgtttgtgaggtattggttttggttgtttttttggggtgtttggagttttttgtttagaggttgtggtgtttttattttttgtggttaagtgtttgggtaattatggttagggatgtttggtggtgattgattttttggatgtttaaagttgtggttatggggtttttgggagggagtgaagttgttgggttaggggtgtatatatggttaggttatttttttagagttttgttttgggtttggggttttttaatgtggttttagttgttttttgtttggtttagtgtatggtgtatatggttgtttgtggttttgttttttttattttgttttgggtttttttgtttatttatatgtaaattttagttgttagttgttgttgagtgtggtaattgttagagttggatttttttgtagttttggtttaaatttttggtttttgaaaatttttaaatgagaagtagttttaggtgtttgtttttgatttatgttgtgttgttgggttttttttttttggagaggttgggtttgggatgtgtggtttagtttggggaggtgtaaaggtggatggggtgtgtgggaggaggtggttgtggagggggtggggggattggtgggggtggggttgggtggggtggggttggtgggggtggagtgtattttgattttgagttttattagtgttttggttgtgggagggagtgtaagggtgtggggtgtggggtgtgggtgtgggtgtgagtgtagtgaaggaatgagttgggtgtggagttgggtttgggggtttgtgagagtatagtgttgttagttagttggggaagagagggtgggattgtttgttgttgttttgggattgtatgttgtgtgtgtgtgttttagttttgttggttagtgtaggaggttgttgtttgggtgtagagggtagttggtggggaggtatgttgttgtttttggtgtttttgttttgtttggtgttgttgtttgtgtttgttgtatgaggtaggtgtttatttatttgtgagtttttattttttgtgttttttggaaattttggtggtgtttggtgtgtgtgttttatggttgggagtgggtggtggggaggttagtatggagagggaaaagtgggtggtttggggtgtggggttttggagttttgggattagggaggattgatttttttttttgatttttttgtggaggtggatttgtgttgtttgtgtttggagttgagttaggaggttggtgtggggtgttggggttttggaggttttattttgggtttgttttttatttgttgtgtgtggggtttgttgttggttggttgggtgggtgggttgtttattattttttgatttgaatagagttggttttggttttttgttgtttttttgggttatttatttttttttttttttgtttttggtttatgttggggtggatgttggggtgtggagtgtgggttttgtggtgttgtgtttgtttttattgatttgtgtggttgggttgggtttttgggtttttggttgttttgtttgttggtgttttttagtttggtttttagtttgggggaggggttgtgtaagaagttgttgtgtttggggggattgaattttttttttgttttgtggagttgaagtttggaaagtttgggggtggagagtgggatgtgggtggggggtttttatatttttttttgttgtatagtgagtggggtttttggggaattgagtgattaatttattttttttttgagagttggaggtgagaattatttgtttttttttagaaagtgtggttttgtgttatattttttttttttgttttttagttttggtaagatggggagggaggggtttgagtaattgatttttttttgagatggggttgaattttttttgaatgggggatttttattttttttttgtgggtgtatgggggttgttttggagatgtgtgtttgtggaggtaggtattgggtgttggtggaggtggggttgtgtttttagggtgttgttttggtgtttttggaggtggttttgattttataatgggttgttttgattttgaggtggaggttggtgttttgttggtgggtggggtagtgggtgagtagttgttgtatttttttatgggtgggagttgagtgtggttattttttttttttttgtttagttttgtttttttgtagaatgggtttgaatagaggtaattttggtggttggatggggggttttgttttgttagattttttagtgagtttttagggtggggggtaatgttttggagagtagtttattttgtttttgttttttttttattgtgtttaggtggtatattaggttattttattttgttttaagtaggatgtgttttttgttgttttttttttttttatttttgattatagaattttgggtagaatgttgatgtttttttggttttatggaggggttttttgtggatttgtgttttagtaatttatgatattgagtagagtgtgtttggggtagggggtggatgatgttttttggttgggtgtaggtttttgtttttagggtaattagggtttttggtggtggtggtgtgggtgagattgatttttttttttttgtttttgtttaggtttgtgatgtttttagtttggtgagatttgtttgaatggtgggaagtgtgaagtggttaatggtatggaggtttgtgtgtgagtattatttttgtgggatttgttgttttgttgagggtagagtttttgttttttgtagttgtgtaggggatagaatattaggttattgttttttggagatggtttagagtttgggtatggttatgtgttgatttttattggataaagtttggtaattatttaattattagtaattatgttgtgtgtggagttggtttggttgttgagggtttgggtatttttttgtgggttattttaggttttggggttattaagtgggagttttagtattttaatttttttttaagtttttaagaaatagttgatttgttaggggaagttttggattatttattgagaggtttagtttttattattttgttaatttggggtgttttttttgggtgggtgatgttttttgggtataggtgatgtttttttttgggggtgatgttttttaggtgggtggtgatgttttttgggttggtagtgatgttttttttggtataggtgatgttattttttgggtgggtgatgttttttttgggtgtgtgatgttttttgggttggtggtaatgttttttttgggtataggtgatgttattttttgggtgggtgatgttttttttgggtgtgtgatgttttttttgggtatgggtgatgttattttttgggtgggtgatgttttttttgggtggtgatattttttttaggtgggtgatgttttttttgggtggtgatattttttttaggtgggtgatgttttttttaggtataggtgatattttttgggtaggtgatgttatttttgggtgggtgatgtttttttaaaggaaattgattttttaaaattggatttgtttttgggttttttgtttgttttagttttttttttttggttttaggttggggttggggaagagaaggtggaatttatgttttggtgtggggtgtggggtaattattgagtttggtttttgttttggtatttgtaaattttgattttaaaattttgtggtttttttggtttgttagttttagatgtaaaatgggtattgagggggttgggaagttgtgtggaattgtttttttttgtttgtttgtgagtgtttattagttgtggggaattgttttgttgtggttgatgttttttaatttgagtttatttttgatgagaataatgaggaggtgtttggtgtttggaaaaagagttttttttgttttttaggagttatagatgaagaaatggttttttagttagtttgtgtgtttttattttaattgtagaaggttttatttttttgataattttagtttggtttttgtttgtgttgattgtttagtttgtgggtagtaggttttttttttttttggtttttattttttttaaattgaagttaattaagtaggtttgtgagtagtttaatggataaagttgattgtgtttttgttagatattaatgaatgtgtattatttttttttttttttttttttttgttttttggggtttttttttttttttgtagaagttgtatggatgtttgatgttttaaattttgtttttttttatttagagattgatagttgggatttaggggaagtgtagtagttattgttgggggaggtggattaatgttgtgtgattaattatgtgtggttttttagaatgtataatttttttttttgttattgtgtttttggtttggattttgttttttatttatttggggttttgggagaagttttttgtttttgtagaggattttgggagggtgggaggaatattgtgttgggaaaattgggggtttgttgtttttttttagtggtattagggagtaggtatagtttggtttataggggtttgggattgaggtttttttgggttagagtgttgtgttttggggtatagattgttgtagttttttggtgtttgggttaaaattttgttatagggttgtaaaatattggtgttatgggtttatttttttattttttaaatttgggattttggtgagttgtttttagtttaaggtaggttgttgattatggttttggtgtttggttttgttttttttgttggggtttggtgtttttttttttttggtgggaagtttgttttagtttggtttgataggtagttgagtttagtttatagagattttattgtgtatattttataagtttaatgagaagatgggatggaagtgtgtttttaggtttttgtttttgggttgtagagttggaggttagggttatagttgagtttggtttgtggaggtataggttagggtttatatagtagtttgggggatattgtagttgttttggagaaggttttgggttttttttttgggtttgagttttatttaatatatattttttaggtgtttttgtttttttgtttttgtttattttttttagaaggtttaggaggtttgtttaggagttagttagggtatttgtaggaggtttggtttttttagtaaggggagaaatttatattgttttttgaaagagtttggggtgtaggtttttggagttttgttagtttgagtgggaattttggttttgtggtatttagttgtgattttggaaagagttttggtttttggtgttatttgttgtttttgttgtagaaggggtatggttatgatgggtgttatagtgtttggtttattagtattgggtgaattatttttttttattttaaagagaaggaatttttattggaagttgttaattaggtggttgtagggtttgggattggaaaaagtggttttgttggtgtaaaatgtttttttaggaggttagagtgttgttgtggtttggttagttagtggttaggtagaaagtatttggtagtatatgttggtgggtggaggatggttggtttttgggtagttgttgtgtgaggtgtggttgtggtggttgtggttggagatggtggttttttgagtaggtttagggggttattgtggtttttggtttttttttagtttttttattagttttgttagtgtgagtaaggggtattgaagagggttttattttttttttttttgttttgaggagagttgggaagagttgtagggattttatttgtttgggtgagattatgtttttggtttgaaatgtttttttagggttgtttgtgtttgggttgggtgttgaggtagggggtagttaagatgttggttgttgatggtagagttagaatggtatggggtgttttttaggagttgggagaaatgggggtaggttgttatatttagtatttttaggaggatgtttagttgtttgttgggtggtgtgttttagttttggataattttgtgtttgaggtttggtttggttattagttttgtgattttgggttattaggttatgtaagttttagtttttttagtatgttagttgggttgatatatgttggattttttggtggtgtgtgaggattgtatgagaattgtgtggagagggtatttggttagtgttttttttttttttgttttttttttgttggttgatagtgttggtttttagagttttttttttgaatgtttaattgattgatgagtgaatttagagaattttaaaggtgttgtttggtgggttgggtttggtattgtttggggagggatttgttggttttggggaagtttattttttaggatggttttagttttggggaagtttattttttagggtggttttagtttatagatatgtttgagtgtttgttgtgtgttgtgttttgttttaggttaggtttttggtggggatagggtagatatggtttttgtttttgtggagtttattttttagtaaggtgtgagagaggtatttagtttatatgtgggatatgttgggggtgtgttggtttggtggtggtttggtatagtttttggtagttttgtaaagttgtttggattaggtattgataagtgagaagaagagatttagagaagttgttattagttttagggttatatagtagtggtagaatttttattagttttgttttttttttttttttaagtgaatgtttttaaatatagttttagttagtttgagttgttttgttattttttgattataagtggattgggggtgtggtttttttttaaaagaagaggaaggaggtttaggtgggaagtgatttggttttgtagttggtttgggaggttggggagggatggggtagtttttgttatttggtttggttttttttattgagttatttgttttgttttgggtgtggttaggggaggaataggttgatttttttttttatgttgagttgagtggaaaggtttgtgataggattttttgtttatgtagaatttggtttttaagggtgttagggttagaaaaatatgtttaaaaatatgtagtatttgaggtgggtagattatttgaggttaggagtttaagattagtttggttaatatggtgaaatttttgtttttattaaaaatataaaaattatttaggtgtagtggtgtgtgtttgtaattttagttatttgggaagttgaggtaggaggattttttgaatttaggagatggaggttgtagtgagttgagattgtgttattgtattttagtttgggtgataaagtgagattttgttttaaaaaaataaaaaataataaaaaaaattttatatagtgttaaatagaaagttttatttatttagattggggagatattaggaataggaaggtttggggtggagattggggtgggagtttggagtgttttgaaggaagttggttttttggggtaggttttgtttttgaatagtagttaatatgttttttattgaaaagaataataatagaaaaagagagagggagaaagaaaatagtaattttggtaggaagagggtagggtagggtagatagtgtattaggggaagtgtttttatagggtagagttgggtgtggggatttttagatgtgggtggtaaattggagattttataggagttgggattggttttattttttattttttgtatttgtgatgggtagtagtggttattggtgtttattgggtagttttaggttgggttgagggattgtatttttttgttgtggggaggggattttttttgttttatgttttgtttataaatagtgaaaggatgtggttttgtagaattgattgggtgtttagtttgttttttttaataatgtagtgatgatagttttatatttaggatgttgttgttatttagttttgtaaaagttttggtagatggttgtttattttttaggtgtgttagtgtagtttttatttttagtgtataggtgggaaagttgtggttgtgagggtgtggggatttgaggtaggttggtgttagtttttatttttatgtgtaggtatatttagaattttttggatttttttttgggttgaggaggaaatattagtagttttaatgagtggttggttttggggtattatatttgtgggttgggttgtgtttgatggttttgagttttttaggtagtgttggtgtttttttttgtggggtttggagttttgaggggttgtgaagtagggttggttttgatttgttgtgttttttatattgttttttttttgggttttagtttttttatttgtatgtgattttttttttaattatagttagtgggattttggggtgggttgaaggtgtggtggtggttgtgggttttgtggtgaggtttgtgttgggtttggtggttgttttagttggggaaggggtagtggttgtaggggtgggagggtggagggaagtttttttttaaagttgtttggttgggttttttttgtggttttgttttattttattttgttttttgggagtaaagggagttaaggattggtttggggatggatatgtatatggagggattttgggtgatgatttatttatattataaaatttgtttttttttgtttgttttttgagatggagttttgttttgttatttagattggattagagtgatgtagttttggtttattgtaatttttgttttttagatttatgtgatgtttttgagtagttgggattataggtatatattattatttttagttaatttttgtatttttagtaggggtagggttttattatattggttaggttggttttaaatttttaattttaggtgatttatttgttttggttttttaaagtgttgggattataggtgtgagttattgtgtatggttatttttttgttttttgagatggggttttattttgttatataggttggagtgaagtggtgggattatggttgattgtagttttaaatttttgggtttaagtgatttttttgtttttgtttttagagtagttgggattataggtgtgtattattatgtttagttaattttaaatttttttgtagaagtggggttttgttatgttgtttaggttgaaaatgtgatttttgaattaaagtatgttgttgtttgatatttagtttatttataagtttatttaattattatttagttttgggatttttttattgtataaaatagaaattgtatttaaatattgttattttgttttgattgttttagtttttggtaattattaatttgttttttgtttttgaatttgttttttttggatgttgtttatgaatggaattgtgttataggtggttttttgtttttggttttttttattgagtgtgatgtgtttaaggtttatttatgttatgtgtggattagaattgtatttttttgaggattatattttagtttttagaagtattagggattggttagaggtggattttagtattttagtttttagatagtttagaggaggtaggtgttgggagggtgtttggggtggttttttggaagagatggtgtttattttgggttggtgtagttatttgatagttatagagttttttagagggagttttggtatatttttaggtgaatttgtaggatggattggtgtgtttgtggtttttgttttgtttaggattttgagataggtttataatttgtttttgggttttatttatgttagttgttaagttgtttagtattttttagtttttaggaggtatatagtggggttgtggttattgagtgtttatatgtttggtgttgtaagaatgtaaagtagagggtttttattgagtatttattatatgttgaattttggggtatgggtgggtatggtagatgtaggtttttttgggtaggggaggagtatgttttttaagaattaggttataggatggatgggtttggttataagttaggggtagttattgtagtttttatggttttttgtgtgtaaagttagtgttgtgggattttatttgggtgtatttgttgtggtttttaagtgaggtttattatggagtagtttttatgttggttgggatagggttagtggtagggagttttagattaaaggagtggtggtggttggggtagtggggggtagtgaggttttggatatatttatggggtgggtaggtattttagtttttatttgtttagtttgtttgttttggggtttttttttttttggatagagttttgtgtgattggttttaggttgtttttttttttggatttttagggttagtttagagtgattggttatgttttggtttagatttaggtttgtgtgataggagagagttaggaatttggttttttattttgagatatagatggtgttttttttaagttgtttttgggatggggaagtgttatgttttttgtagggtattaggttagttagtggtttttgatagtgaggttttgtttgtaggtagttgggggatttttttttgttgggaggatgtgtgtgtgttagtattggggtgtttggttgttttaggggtggtgtagggtggttataggtggttttagtattttggggttgtttttagtgtatttttgagatttgtggaattttgggaggagaaattttttagtagtgtttttagtgtgtttttttattttgtatttgttgtttttgggagggattttgagtgtttttttttatttattatgtatttattgttttaggagggattttgagtgtttttttttttatttattttgtatttattgttttgggagggattttgagtgtttttttttttatttatttttattttgtatttattgtttttgggagggattttgagtgattttttttttatttattttgtatttattgtttttgggagggattttgagtgtttttttttttatttattttgtatttattgttttgggagggattttgagtgtttttttttttatttatttttattttgtatttattgtttttgggagggattttgagtgttttttttgatttattttgtatttattgttttaggagggattttgagtgtttttttttttatttattttgtatttattgtttttgggagggattttgagtgtttttttttttatttattatgtatttattgttttgggagggattttgagtgtttttttttttatttatttttattttgtatttattgtttttgggagggattttgagtgttttttgtttattttgtatttattgtttttgggagggagatttttgtagaggttttatttttgaattttttatttataggtttaggggtttagggttgggggtgttttgttgtttatattttagattgagtttgtatggttaaatagggttttttttgtatgttttgtttaatgtaaagtggtggttttgggtgggtttttaaggggttttgtgaattttgggggtttggttttttttatttggttgtatttgttgggtgggagattttattttttgagtttttagttttttagttttagttgtagtttagatattagggttttgtggggtgggggtggggtagtggtttttttaggtttgtggggttgttttgttgtggtttttgtaattttttggaaggaggtttggggtttggtgtttagtggggtttgtggggatggatttgggggttttgtggggagggattgggggttttgtggggatggatttgggggttttgtggggagggattggggggttttgtggggagggattgggggttttgtggggagggatttgggggttttgtgaggagggattggggggttttgtggggagggattgggggttttgtggggagggattgggggttttgtgagagggaattggggggttttgatgtgttgggtgtgtataggggaggttttgtttttgatatttatatttgtagtttttaggtatatatagtggttttattggggtttttgtaattatagtttgtgagtggttattattaagggtgtttttggattaggttaggtttagatgttgtttggatttaatttttatagtgtttgttgttatagtagggattaatggttatagaatatttatttggttttatttgtatggggttgtttagtttggtgggtattaggtgggtgttgtttttgtttagtgggaggtttgttagttttttggttgttagttgagatttttttttaagaaatagttgtgttgttttttttgttttgtttggtattgaggttggtgatatgttttgattttgttttaattggtagatgagaatttgttattagatgttgattttgtttatgtagttttttggttttggagtttattgtgtatttttgaagggtttgaattggttgtttaaagttgggtaaatgtttttttgatattttgttgatattgttaatttgttgaataaatttttttataggtagtataggaggttagttttgttttagtttgagttaaggtttagggaggtaggttttgtgtggagttagtttttttgtgagtgtagtggttttgtaggatgtattgggtttgagaagtggatttttttgttttttgttatattttaaaagtttttagttatgagggtaggatgaagttgatggttgtttttgtgttgagatgataattgggtatagaggtggtggtttttagttttttgtttttttttttgtagtggggttatttagtgtgatttatggtttgagttataggtatttgtttagggagttatggtggggagatttggttttattagagatgtgtttgtgttttattaagtttaaaggaggaaattggtgtgttt

SEQ ID NO: 275 - DNA, 3286 bp, Artificial Sequence
  chemically treated genomic DNA (Homo sapiens)
agaatttgtggttaattttagaggattggtgagggttggtttgggatgaataaatatttgatatttgatggttttttttttgtggtgatttttattaagttgaagtggtgtgtgtgtgggtaggtgggagttgggatttggtttgtgtggtgttgtgtatttggattttgaggttatgttggtgagtgtggtgtggggggtggggagtgggatagtgggattgtttgggttaagtgattgttttaaagatattttttattaagatttttttgtatttgagttttatttttttttggtttaggaaagtttttgtgtaagtggaagatgattttttttataaagtgttgtatgttattgtgttttggattgtgtatgaatattatttagttgtgggtgaagttttttatggtgggttttttttttatttgggtgtggtgttttagttttagttttatttgtatggtatattgtgggtagggggaggagagatagttgtgaataataggaaggtgaggttttggtagtgaatgttgtgtttgatatttttttttttttttttgaaatgtatataaaaggaaatggtggtgttttttgtatttatgttttatgtgtgtgggtgtgtatattttatatttttaaatatatttgtttgtttggtttggtttggttttaggtgttttgggttttgtatttatattggataggattgtaatggaatgttatttttagttgggaagggggttggggaaaagagggagaatatatttagttatgataagtatgataataaatgtattggaaataaattagaaggtgatgttggggtggttttttggtgtgggaggggaggtggttgggatttagggggattgaagggtttttggtgagttttttttttgaaagtattgtggtgataggtatatgttgaggaagtttttgtgtatgtgtgtgtgtgtgtgtgtggagtgttgtgttaggtgaaatggaaattataggtagtttttgttgatgggtataaatttttgtgtttttgttatggggtttgtgtataataaaaatgagatgttgttatatatattgaaatatatatatatgtttgtaggaaaatatgttgaggtatttataatttagagtattttgtattttttagtgaaaagttttatgtgattggtgaggttagttgaattgagtttttgtaatatatttttaagagtttaagtggttttaaagtattttttatttttttttaaaaaatgaaatttagaaaggtagggtggtgggtggatagttgttgagttttggtttgtgtttagtattttttggtgttggggtaaagttgtgtgtggttttgttgttgttagttttgtatattttggtttatatatgtgtgttgtggagaatgtattattgtagtggttgtggtgttttgtggaggtgtggttgttgaggttgtttgttgtgtttttggattgtgtttgtagtttttggtggtggtggttgaaatatggttgagttattatttgtttttttttattgtgtgtgtgtgtgtgtgtgagtgtgtgtgtgtgagtgagagggagtgtgtgagtgtgttttttgtgattgtaaagaggtgaggagggagggaggtgtggggggtggaggggtgagtgtgagtgtgtgtgagtgtgtgtgtgtttgtgtgtttgtgtgtgtgttgggggggggtgggggaggaggggagtggaggttgagggagaggtggtagttttttgtaagttgtattaatttttttttaattggaattgtggagtgttggtgttgtttgggttgtggtggtgtagggtgaggaaggaaagtgggggagggtttttattattatttttgtgtgtatttattgagttagttatgtttgggggtttggaggtttgttggggtgttgtgtggtattttttttttttttgtttttttttagttgtaatttatgaagaggttgttatgaatgagagtgtgtttaggagtggagggtagatggtggatattttttgtttttttttttttgtgtttgtttgtttgtttgtttgtttattaaatttagttttaaaagtaaaagtagtagtagtagtagtagttttagggtaaagaagatgattgtggagtatgtgttgtggtgtttgatatttgggttttgagttttatagggtggagggagggtttgtgggtggggtggagtgtgtggggaggtagagtgagtgagttagggggagtttgaaagagttaattatttgttattttttgaaattttggtggtttgtagtgttatattggaaagttttgtttaaagtaataggtttttgttgggggggtggtagggaggggatgtaggagtggggagagtggttagttggggagttattttagtttttgtgtaaattttgtttgttttataataaaaaatggattaaaattgttggaatgtagttattgtttagagtttttagtagttggagagggggtgttaaattaagtttttagttagtatgtatggggaggagggagtgggtttttttttattttttattatgtatttttgtggttttgtgttgaaaagataagaatttatatttaaataaatttatttaaagagagtgagagaaatgttattttgtaaaaaatgagtatgaaaatagtaatgattgaggttgttttaatttgtaatgattttttggttttttgttttatttatttataggtatttgtttgttatttttattttttgtttttttgttattgttattgaaaatttgaaaatgaaatgaataagggagaaataaggatgttatttttttgtaagggaatgttttttgttttggtaatttttggttgggaagttttataaagtggtgtttaggtgaaagtaagatatttgggagtgttgggtatagatttttggggattaggtttggagttgttttttttggggggtttttttttttgatagtttattgagttgtattagaatgtggaggattgttttttgaggatgtgtggggtaattgggagttttaaaatagtagataaagttaatattgattgtaatgtgtgtaaattggattataatttttaggtgtattggtgataattagtgtaatttatttttgagtattaatttggttagatttttgggtgatagttagttgtaggagtgtttttagagttgtgtttttgtaaatgtttttatttgtgttgtatttgattttagtggttggagatagaatagtgtggttatgtgtggggtgtggagagg

SEQ ID NO: 276 - DNA, 3286 bp, Artificial Sequence
  chemically treated genomic DNA (Homo sapiens)
tttttttgtgttttatgtgtggttgtgttgttttatttttggttattgagattaaatataatgtgagtgagaatatttgtagaggtgtgattttgggaatatttttgtgattggttgttatttgggagtttaattggattaatatttagagatggattatgttggttgttattaatatgtttaaagattataatttaatttatgtatattatagttagtattaattttatttgttattttaagatttttggttgttttgtgtgtttttagaggataattttttatgttttgatgtaatttagtaggttgttaggaggggaagttttttgaagaaaataattttaagtttggtttttgagggtttgtatttggtatttttaggtgttttgtttttatttgggtattgttttatgaagttttttagttggggattattaaagtggaaggtgtttttttgtaaggaaatagtatttttgttttttttttgtttattttatttttaaatttttggtggtggtggtagaagggtggggagtgagggtggtgggtgggtgtttgtgagtggatggggtagggggttaggggattgttgtgggttagaatagttttagttattgttatttttatgtttgttttttgtaggatggtattttttttgttttttttaagtaagtttgtttgggtgtgagtttttgtttttttagtataaaattatagaaatatgtggtggaaagtaaaagaaagtttatttttttttttttgtgtgtattagttaaggatttgatttaatattttttttttggttgttgagggttttaagtagtggttatattttagtagttttaatttgttttttattgtagggtgagtagagtttatataggggttgggatggttttttagttggttgttttttttatttttgtgttttttttttgttatttttttagtaggaatttgttattttaagtgaggttttttagtgtggtgttgtgggttgttggggttttgggaggtggtaggtgattggtttttttgagttttttttggtttgtttgttttgtttttttgtgtgttttgttttgtttgtaagttttttttttgttttgtgaggtttggagtttgggtgttaggtgttatggtgtatgttttgtaattattttttttattttggagttgttgttgttgttgttgtttttgtttttggggttgagtttaataagtgagtgagtgagtaagtgagtgtggggggaaaaaggtagagaatgtttgttatttattttttgtttttgggtgtgtttttatttatagtagtttttttatgaattatagttgagggggggtggaggaggggggggtattatataatattttagtaaatttttgggtttttaggtatggttagtttggtaagtatgtgtaaaaataataataaaagtttttttttattttttttttttgttttgtgttgttgtagtttagatagtgttagtgttttgtggttttaattagagaaaggttggtatggtttgtagggagttgttgttttttttttagtttttgtttttttttttttttatttttttttggtgtgtatatagatatatagatatatatatatttatatatgtttatatttgtttttttattttttgtgtttttttttttttttgtttttttgtagttataagaagtgtatttatatatttttttttgtttatatgtgtgtatttatatatatatatatatatggtggaaggaggtgaataataatttagttatattttagttgttgttgttgggagttgtgggtatagtttggggatgtggtgagtagttttggtggttgtatttttgtaaagtgttgtggttgttatgatggtgtgttttttgtggtgtgtgtgtgtgagttgaagtgtgtggggttgatagtggtggggttgtatgtaattttgttttagtgttgggaggtgttgagtgtgagttgaggtttggtggttgtttgtttgttgttttgtttttttgaattttattttttggggggaggtgggagatattttggagttatttgggtttttgaaagtgtgttgtgggggtttggtttgattggttttgttgattgtgtggggttttttgttggggggtgtggggtgttttaagttatggatgttttggtgtgtttttttgtgggtgtgtgtgtgtgttttagtgtgtatgatgatgttttatttttgttgtgtatgaattttgtggtaagagtatgggagtttgtgtttattagtagaggttgtttgtagtttttattttgtttggtatagtgttttatatgtatgtatatatatgtatataaagatttttttggtgtgtgtttgttgttgtggtatttttggggagggggtttgttaggagttttttggtttttttgggttttagttatttttttttttatgttgggaaattgttttggtattgttttttgatttgtttttgatgtatttgttgttgtgtttgttgtggttgagtgtgtttttttttttttttttgattttttttttgattggggataatattttgttataattttgtttgatgtagatgtggggtttggggtgtttggggttaagttgggttgggtgggtgggtatatttgggggtgtggagtgtgtgtgtttatgtgtgtgaaatgtggatgtagagggtattgttgtttttttttatgtgtgttttaagaaggaggaaaaaaatgttaggtgtaatgtttattgttgaaattttgtttttttgttatttatggttgttttttttttttttgtttgtagtgtgttgtgtaggtgaagttggagttggggtattgtgtttaggtgaggaaaaaatttattgtggagggttttatttatgattggatggtgtttgtatgtggtttggagtatagtaatatatagtattttgtggagaaagttgttttttatttgtatgaaagtttttttaggttaaaaagaggtagggtttgaatataaaagggttttgataaaaaatgtttttgaaataattgtttggtttgggtggttttgttgttttgttttttgttttttgtgttgtgtttgttggtgtagttttgggatttgggtgtgtggtgttgtgtgggttaggttttggtttttgtttgtttgtgtgtgtgttattttggtttggtgaaagttattgtagagaaaggattgttaggtgttgagtgtttatttattttaagttagtttttattagttttttggggttagttgtgggtttt

SEQ ID NO: 277 - DNA, 23717 bp, Artificial Sequence
  chemically treated genomic DNA (Homo sapiens)
tttttgttgtggtattttagtatgatggaggtttatttttggtttttttggagtatgaatattttttgaggagtattggttttggttttgtaggttttgttgagattggtttagattttttggtttaggagtaattgttatttaattttttatttgtaaattttgttatagaattggtttataattgtttttttggaattttggtggattagttttgtttttgtgttttttttttttgtagagttattgtttttttaggttttttaagtgtatttaagagtgggagtttggttgtttttagtatttgtgttttgttttgtagtttgataagtttgatgttaaggtatttttttgagagttggtttagtagttgttggtaggagagtggttttagggtagtgggaaggggatttttggggagagaatgaggtttgtgtaagggttttggaaggatttaggagttgttttggttttttttttttaggttttggttgggtgttgtgggttgtgttttagttgagtttggtgtggttgtttaatggtgtttttttgtgattgaggatgaaggggtttagagaggttgtgtttaagtgatgttgtgaggttaggttgtgttttgggttagggtggtttttttgttattgttgtttttggttgttaggattaagtatagtatgtagtgttgtgaaaggggtggttttggaaggtgtgaaggggtttttgggttttgtgaatatggtggggttggggtggagttgtgggtttttggttgagtggttgtttagagttttgtgggatatggatggttttagtttggttttttgtgagttttatgtgtttgtgatgttgttgatgtgtagatgttgtggttgtaggttttgtttttttgtgttttttgtaaggttttttgggagttgtagttttagtttttttttgggttgttttattttttgataattttggagtgtggtgttttttggggattgaggttttgggtttggttgtttttagtagtgagggtaggagaagtggtttgggtggttggtggattgggagggtgttatttgaggattataatttttggtttgttttgtgtaggtattgttttgagtttttgttttgttggtgttgtgtagttttgtgggagttgtagtttgggtgtgtgatttatagtgttgtgtgtgttttgggtgtgttgtagttgtggggtttgggttgggtgttatgttatgaaggtagtgtaaggtgggtgttggatgtgggtaggggttggggttggagttgggttggggtgttttgtggttgaggagtgggaggttgtttgggtagtgtggttggtggtgagaggggttttgttgttttttggaggtagaagttgtggattggttggtgggggtgagtgggtttgggggttggggttgtgttgtttgggttgtgaggatgaggtggtgttgttgggttgtggaggtgagttttgttggttgggtttggttgggtgtttagttggggattttgggtggggagtgtgggtttggagggtggtggggagtgtgggtttggtggggtgtaggaggttttgggggttgggtgtgttgggttttgagttagggtagggatggtagggtttttggagtggggttagtttgttgtttgttggtgtttttaggttggtgggggttagggttgggtgatgttttgtagaggaatttagaggaaggtgggaagttggtagggatttgggttatgtgggttatttgaggttagttttgggggttgtgtatattggaggtggttttggttttgtttgtttttgagtgtttttatatttgggtttattgtgtggttttggttgttttagggatgttgtgtttggtgtgggtattattttttttatttggggaatggtttgggggtggttatttggtgtggaggggttggtgggagttttgtttgtgttagttatgttagtgtttttttttgtgtttttttggggttgttgtggtattagttgggaagttgtaaatttgttgtttttttgttggttgtagaaggggtttttttagttttgattgggggaatttttgtgtggttagttggttttggttgggtgagtttttggggtttttttattgttttggagtttgttattggattgtaggtaataagatttggaaagtaatggtgaggtttagaatttgaggttaggtttgggtgtgtggggttagtggggaagattgggattttgttgggtgttgaagagttgtgtgttttttttttgggaaatttggatttttttttttgtttaggtttgaggggtgtggaaatgtgagttatagtttagtgtgggagtgttttgtaattgtttttgtgtttttagagtttggggttgggtaaggatataggggtgatttttttttttggttttgagtgattttttaattgtgaagtggggtaagagaaattgtttttttggtttgtttgggggaggtaggttttgtaggaaattagtttggtttggttttgggttgggtgtgttttgttttttttgaggtttttttgtttgtgggaggagtattttttttttttttgtttttgtttgtgtttgaggttttttagagttttttgattggtagaggagttagtgatttttgagtttttaggagagtttgaggtttagtaattgtataattgtgtagggttttttgtttgggtttttatagattgtggtttttgagagtaggaagtggttggttttttgtaatgttgtatttgtgtgatagttttaagttttgttggttttttttttgggtattttttatttgttttttgttttggttttgggtagtattttggtaattttagtgttataggtgaggaattgaagttggagatagttgtttatggtaggggaggggttgagggaggttgagtgtttggttttttttttttgttggttttattagtttatatgaggtaattggagggaaggattttgttgtttggaaaattttttggaattataggtgttgtttatgggtttgagttgtttagtgaagaatttggttgttggtggttgagttgtttttggtttagttttttggtttgtggtgtgatgtttttatttatggtaataggtgtggataggtgttgagaaggaggatgatattattaaataaaatagtttggggtttttgaaaaatagtgatagaaatttaggaaggttggtgatttgttaggtttgtgtttgttttgggtggttatttggttttggattgtgaggttgaaatgataggagatatggagggtgggtttgggtggtttttttataagatatagaagaaggaggtttttaatttgggggttgttttgtgtgttttgtttttttgtttttttgttttgtttttttggttttgttttttgatttttggtatagtaggagtgtttagaagtttagtgggatttgttttttgtttaaagtttttttgtattttttgtatttatttggtgtggatgtgggtttttttattattaggttgtgttttagttgtgtggagttattggttttttatgttttatgttggagagaatgttgaggtttgtgtggtttttatgtgattttgtagttggtttttggttttttattgtgggatttgtttgtagtatttatatttgggattgttttgtttttttgttggatgtggtgttgagggtagggtttgtttttgttttttggtaggtttagtgtttagtgttatgtagttgtgtgtagagtaggtggttagtgagtatttggggttggtttttattataggtagttttgaatatttgggttttggtagtttagggggatttttgtgtgttttaggaaagtagtatagtagtttttgtggtgtggatatggttatatttgagtttggtttgtttttgagtttgagagaataggtttgttggtttgtgatttttgtatgtgtgttttgttgtagggaggttgtgggttggggttggatttagatttgtttagttatattttgttattatgtgggttatatatagttgggtggagattttttggtgtgtggtttagggaggtgtttgggtgtggagtttgtggatagttatattgtattattaggataggggttgttgttgggtttatagggtgtatggaatggggtttgtgggaggatgggggtattttagtttagggtagggattttgtgggttttttaagatgagttgtgttaggttgttgttttgtatattttgaggggtttgtttgagtgttgtatgggaagttagtagtgtggttgttttttttagaatttatttagggtattagggtggatttatgagttttgttgggttatgggtattagttttgttattttggtttttagatataatgatttgttagattttttgaggttaaagggaagttttaagggttgttatttttgtttttttggtggttttagatgggatgttaggaggatgtagggttattgttgttttttaaatgttatagtgattgtagtgtttgtttttttgtggaaggagtttgttttgttaatgagggagtttttttttatggttttttttttatttttttttaaaaagttgttttttattttaatattttttaagttttatttttttgagttagggttgtgttttgttgtttatgttggagtgtagttgtaattatagtttgttgtagttttaaatttttgggtttaagtgatttttttgttttagttttttaaatattgggattataggtgggtgttattatatttagtttttgttttttgtaagtgaagttttttaggtaggttgaattttttatattttttgtttttgtttgatttttattttttattttttatttttttgttttttgtaatgagaaaggtaataagttttggagttttttggagtttttgttttttttgaaaaggtggttgtagagaggttggagttgatggggaaagaggtgttatgaggttttttttgggttagggttatatggtttttaaggtttttgtttttttttttggggtgataggtgtttttagggttatatggtttttaaggtttttgtttttttttttggggtgataggtgtttttagggttatatggtttttaaggtttttgtttttttttttgggatgataggtgtttagggttatatggtttttaaggtttttgtttttttttttggggtgataggtgttttttgtgttttagaggtttttgtttggttattagtgaggttattgggttgtttagattagggttgtttttgttattatatggtaagtagagaagtagagaagtgttaaaaattatgagtgtttgtttggttttttttttttgttaaaaatagaagttggggttgggtgtggtggttgatatttgtaattttagtttttttagaggttgaggtaggtgggttgtttgaggttaggagtttgagattagtttgattaaaatggtgaaattttatttttattaaaaataaaaaaattagttgggtgtggtggtgtgtgtttgtaattttagatatttaggaggttgagattgtagaattgtttgaatttgggaggtggaggttgtagttagttgggatggtattattgtattttagtttaggtgatagagttatattttgttttaaaaaaaaaaaaaagaaaaaaaagtagaatttggttgggtttagtggtttatgtgtgtaattttagtattttggaaggttaaggtgggtgaattatatgaggttaggaggtagagattagtatggttaatgtgatgaaatttttatttttattaaaaatataaaaattagttgggtgtggtggtgtgtgtttgtaattttagatgtttgggaggttgagatattagaattgtttgaatttgggaggtagaggttgtagtgagttgagatggtattattgtattttagtttaggtgatagagtgatattttgttttaaaaaaaaaaaaaaagttagttgttgtggtttatgtttgtaattttagtattttgggaggttaaggtgggtggattatttgaggttaggagattgagattattttggttaatatggtgaaattttatttttgttaaaaatataaaaaaattagttgggtttggtggtaggtgtttgtagttttagttatttgggaggttgaggtaggagaatggtgtgaatttaggaggtggagtttgtagtgagttgagattatattattgtattttagtttgggtaatagagtgagattttgttagagaaaaaaaaaaaaaaaataggtgatgtttgtgttattggatatatttgtatattatttttatgttgattataaaagagggtgaggggttgggtatggtggtttatgtttggaattttagtattgggggaggttgaggtgggtggattatttgaggtttggagtttgagattagtttgattaatatggtgaaattttgtttttattaaaaatataaaaattagttgggtatggtggtgggtgtttgtaatttgagttatttgggaggttgaggtaggagaatagtttgaatttgggaggtggaggttgtagtgagttgagattgtattattgtattttagtttgggtgatagagtgaggttttattttaaaaaataaaataaaaaatttaaaattaataaaaaagagggtgatggttgagtgaggagtttatggtgggttttatatagggtttaggaaggatagggtgggaagtgtgagtattttgtttattgtagtgggtttgttatggagagtatgattttagagaagtaaagttgtttggtttgaagtagtggttgttttgttgatagttgtagtggttgggtggtatttgggttggggtttgggggagtttaggtggttatttggttgtgtgtttgtgtttgtttaagttgggtatttttttttggtagtgtttgggaagtttggttgttttttttggttggtgttgttttgtagttttgtttatggatttttgtttatggtttgttttttgtagtagggttgggttgtgggaggtttggataggattttgaatggttttgtttgtggttttggttggttggaggttgattgtattggataggttaagggttttaaattagggtagtgaggagtttgttgagtttttgttgttttttgggttgtttttggtgtttggatagatatttaaggatagaagtttggatagtttttaaggtgaagggttttttggggttgattttttgggattttggtttttgtagagagggttggaggtggggttttgtgttttagggttagagtttttttggtggaagttgaggtgtttgattaaatgtttttttttttaggtagtagtttagatgtggtatagagagggtttgggagtttgttgtagttttaggtgagtttgtttttaagttttgtggtttgtttatgggtttgtttgtgttgtagaattgtttgtggagtagtagggttggagtgtttatggttggggggttttttggagtttttgatttatagaatttttggaggttggtagttttgtttgttttgaagagttttgtttttttagttgtttgggttgtggttttgttgtgggaggtgatggtgagggtggtttggggttttgataggggtgtttgtttttttggggattttttttgtgttgtggttttggtttttagatggagttttttatttttatggtagtgttggggttggggttggtgaggagtttgtgtatggtttttattgttatttttagttaggagggtgtttggtttttggggagtggtttgtatttgtttttggagaatgttgttttgttagttgttatttggggtgggtggttggagtttatgtttttttttagggtggggttttggttttgttttttgtagggatgatgggaagttttgtttttagtttttttatttgatttatgtaggagttttttgtttttggggttattttttttataggggttttagtgttagtggggataaaggtagagttgtttgtttttaggttgtgggtattgattgagttttgttttggtagtggttggtttttgttttttgtttggattagtagtttttggtttggtgggtgtagttttagggtgtagtggggttgttgtggggtaaggttaggttattagttgtttggatataggggtttttgttttttatttgttgttttttatatttttagtttgggtaggggtgatattggggtatttttgttggggttgttgtggtttttatggtggtaagatggttttgtgaaagattgatggagatgtagggtttaggagtaggtgttgtgtgagtgggatatgtttgtgttatttgtggggtaggggagggtttgggggtatagttgtgtatatgattagttagtgagatagtgaggagtgtatgtggagtggatatagttgtgggtgttgtttgtgtaaggttgggggttgttgtgttagttttgtttttatgtgggtttttagttttttaggtagggatgttgattttgggaggtgtttttgtttgtatttattggagttttaggagtatgtgttttgtttttatgggttatttttattgagtttattatttattgagaggtattttgagattttgttttgttatgggtgggttgttaaggttagtattagagatttttagtagattttagtggttgtagatggagtggggtggtaatggttatttttgggatttagttttgtgttgagttttgggtagtgtgattattttggttttttttgtgtatgttttttggttggatgttttttgttgtttttatggggtgtgtgtgtggtatataggatagggattggttagttggttttgtttattaattatttgtttttatagggtagtggtggttttatttttgtaattttttgaggttggatttaggttattgttttgtttaaaattagggtattggtttttagggagggtggggagttgtatagttggatttgtgggggttaggtatggatttatatagtttggggttttttgtattttgtttttttagggagtttagaggtgggtgtggttgtagtttggttttgtggtagttatgagttatggttatttttgaggtgttgttttgagagttagttttgtggttatggtttttgttggtttttatttgtgagtatttgaaatagtttggtttatagtagaggtttggggggtatatgtagtttatgggagtagtatagatgtttggttggtggtaggttttataggagtagtagtggtttagggtatgtttttggggttaggggttagagtttggtatgttttgtgggggttttattttgttgttttttggtttggtttgggtatattttttggtgatagtgtttttgtatgtttttttttttttttggttatttagatagggagttaggatgggaattatggattgatttgatttgtgtttttggggttattgtattgggtgatttatgtgtgtttaggttttgaggtgggttggatttgggagtggtaggtgagtgttttttttaagagtttttggttggttgtagtaggttttgtttttgttgtttttagtggttttggatatgataatttttttgttgaggtttggttggagttagtatttatggttgagatgtagttagttttggttgggtgttgtttttgggggtggttgttggtgttgtttttttttttttttattattttttgttttttttttttggggtttttttattggagttttttttttaaatgtagttttttttttttaggggaatgtgggttgggagtttattttttttttttttgagatggagttttgttttgttgttttggttggagtgtagtggtgtggttttggtttattgtaatttttgttttttggatttaggttatttttttgttttagttttttaagtagttgggattataggtgtttgttattatgtttagttaattttttgtgtgtttttagtagaaatagggtttttttattttgtgtaggttagttttgaatttttgattttgtgatttatttattttggttttttatagtgttgggattataggtgtgagttattgtatttggtttgggagttttttttgtagttgtttattttgtattagtatttgtttattatgagtggatggaatatagggggatttaggatttatagttgtatttgggaaggttagtagggtggattttgggaagagtattggtgttagttttttatagttatttttgtgatgggatttttaggttggtatgtggttggtagttgtgttttgggagtttttgttttttagtgggttttgttagttagggtagggtttttggtattttttatggggtttttgatttttttggtagtggattggggtggtttagtgatattatttttggagattttttggtgtgtgttggaaaaattttggagagggtttaatagagttagttgtttagtttttgtgatagggatgtttgtttttttttgtagggttttttttttttttttgagtatttatgggaggggattgtgttgtttttgtttttttaggataggttttttttttgtttagatggggtttatagggttagttgtttgagattggttttagtttaagaaaggttttttgagtgagtgtaggggagtaggaggttggtgagtagtttgttttttgttttgggtgtagttgggtattatttttgttttgggtttaaaggtattagtgaggagtaggtggggtttggtaggagtttgtgtttttagtggtatgtgtgattttaggtgttatgtgggtgagtgtgtgggtgggtgagtggtgaaggagttgaggttggttttggtaggtgtgtagtttttatatagaatgggtagggtttttgttagagttaaattagtttagggtttagtgtaagtagtttttgttttgtggtatttttgttagttgttgtttttatttaagttttgttttgttttgatttgtttagggtttggttatagaaggggagtgttggaaatgtttaatttgttttttgtgagggatttttgtgtggtttgggttggggaatgtaggggttgtttgggtggttttggtgtttggtgtagttatgtgagaggttttgggttgatgtgtgggttttttgttagtgagtttgttttgtgtgtgttgggtttttggttttgtttttgtgtggtatttgagattttgtggattttgtttgtgttttgtatgtttgagtgttgttttttgtggaggttgttagtattggtggttgtagggtttgtagtgtggtatgtttagagatttggtttggagaatgggttttggatgtttttgttatgttttatgtttgttttatatggatgtagtgatgttttagatattttggattatatagagtatgttgttaaggtttgttttgtttgtttttttttatttgttttatgtggatattaggagatttgttatgatttttgtggttttgtttatattgtgtggtgttttttggtgtggttgttaggtgtttttttgagggtaggtgtgagtatagggtggtttttgtggagaagtgtttgtaggtgagtgagttaggttgtgttttgttgattttgaggtttgaattttatggaatttttattttttatagagtattgtttttttttttgatttttttttaattatttaaaaatgtaaaagttattgttgatttgtgggttggattaggtttagggttgggttttggtttgtattttatattggttttgtgtgttttgtgattgttttgtttatggggtaggtttgagttattataggatggtagggtttttagggtgtagggtttgtaatgttttaatttttttatgattttagtatttttagagaaaatggatttttgtgttgagtgaagtggtttaggtgaatgttattattatatgggggatttggtggtttttgttttaggttttaaaggagaggggatttagaattttttgttttatttttttagtttttgtttttgaagtttttgtttttaaggttgtggggaggaattagggaagggttggtgtgtttgttgtgtgattttaggtgtttgtgttttgttgagtttagtttttgtggttttagagttgtaggttttttttgggtgttagagtattgattggaaaggttttttatatttttgttttttgttgttttttattgttgtgggggagaagttggaattgtatttttattttttttagtttgtttatttagggttgtttttaggtttttttgagttttaaaggatatgttttttggtgttttttttttttttggttttgttttttaggttggaatgtagttgtggtgtttatgttatttttttatgttagttttttgagtagttaggtttataggtgtatattattatatttggatagtgtttagttttttataaagatagggttttattgtgttgtttaggttggttttaaatttttgggtttaggtgattttttatgtatggtagttttgatatttatttgattttttttttttaagttttattttgatgttggttgtgtgttttagagatttaattagaagttggaagaagggttgtgatgtgtgtgatagtaggaattgttggttaatttatagttggttagtttgttgggatgttattttggttttaattttggtagggagaggggagtgtattggattttggggagagtagttgtttgtatgggtagggtttttttgttttaggattaatgtttttaattgtatttgatttttttttagttagagggggtaaggtggtttttttagaagtataggtgggttgtgtgttagaggttttggatagtttgtgttttttttaggttttttagtaggggtggtttttgtttttttggaggggagattttaggaattggtttttgtttttagttatagttttatagggtttttgttttttggggtttggttttgtgggtgtataaggtatggttgggtttttgtttttttggaagtttttagagtggtatgtgggtagttgtgtgaagtggttttttagatttttatttagtttggtttgtagtagttttttatgttttttgttattttttttgtttatttttgggtagatgtttttttgatttttttttttgtgataaagtaaaagtgtgtgatttttttttttattaaggaataaaatgtttttgaatattatagatgtgatgttgggtttttgggggttggggggtgttttagggttttgagggaggagttttgtgggtgttgaagttgggttgtaggttttgtattgagatgtttttttagtttattttaggtggttgggtatgttgggaagtttttttgggttgtgtgtgtgaattatgttgttttttttttattttttttttttgtttgtttatttttgttgtgtgttattttgtttagttggttgttttgttttttttttttatgttttgttttgtttgttgttggttagaggtgattaggtttggtttttagtatggttgttggttggggggttatggggagttttgttttttttttggttgtagagattgagttggattatagtttttttgggggattgttttatttgggttttttggtagtggttggttggtgtaggagtggtttaggggggtttgtttggggaggtgttttggttagttggtagtattagtttttatggttttgggtttgaaggtaagaggtggggaggggtggttttggagggtttttgggggtagagggttttgtttttagggtgttttttttttggtagaggtgtttgtagagaagtgggtttttgttttttttagttgtggtagtttttttttttagggtgtaggagttgagtaggtttgagattttggttttggtttggttggttggtggtggggatgggggttagtgtgtttaattttggtggttttgtgttttttataggttgtgttgttttatgtagagaagttgtttttgaagtttttttttgggttggggttgttggtggttgtaggttttgggtatattgtttgttgtttatggttttaaagttgttagtatttgttgggttttgtttgttgtttttttgggggttataggttatatggtttggtggttgaattttatgtgttggttttttatagttgttattatggttttggttatttgttgtgttttttaggagttgttattaggttttgaggtgtttggtttggaggtagtttaggtggtgaggtttggattggttggattttattgatgtttttgttgttattttgttttggtttttattggaggtagggatatttaggggtttggggttttggggttagtgttgtagtggttgttgttgtttttatagtgggtttaggtttggtttttgaaggtaatgtgtttgtgttttatatttaaaagggtttgttaggttgtatttggtggtagtttttatgggggatgatgttttgttgtttgttggtttttaggtgggagggatgggtgtggagttgtaggtagtgggtaaggttatggtaggtggttaggtttgggaattagtttttaggtggtatttatgttgaggtttgagttttggttgataaggattggggatgtaggggattagttaggggttgtgtgggggagttttggagttttgtttgtgagttattttgatgaatagggagatgtggtagaggtagggttggggaggggttgtgtgggggagttttggagttttgtttgtgagttattttgatggatagagagatgtggtaaaggtagggttggggaggggttgtgtggggtttggtggttggtagaggaagggtttgtgttttttttgtgtgtggtggtattggagtgttttttagtttttggtgttattgtattagttgttttttagtgagtatttttatgtgtgttgataatagttttgttgaggtagaatttattagatttatttgttaaaagagtgtagtttggttatttttagtggtttgtagagttgtgtagttgttattgtaatttagtgttgtagtattttatagtttatagggatttttagttttatagtttagtgttatagtattttgtagtttagagggatttttagttttagatggttattgattggttttttgttttggtttgttttgtgtagaaggtgtgtggatgtggggttataggatgtggttggttgggtttgttttgtgtagaaggtgtgtggatgtggggttataggatgtggttggttgggtttgttttgtgtagaaggtgtgtggatgtggggttataggatgtggttggttgggtttgttttgtgtagaaggtgtgtggatgtggggttataggatgtggttggttgggtttgttttgtgtagaaggtgtgtggatgtggggttataggatgtggggttttgtgtttggtttttttatttggtattgtgttttttagatttatgtatttgtagtttgaggtagttttatttattgtttttttgtgggatgaattgtattttatttatttatggatgttaggattgtttttatgtggtttttgtggataatgttgtgaatattgtttatgaggttttgtgtggatttgtttttatttattttgtatagatatttaggagtgggattgttggggtgtgtggtgaatttttataatgttttgaggaattgttaagttattttttgtagtggttgtattatttagtttttattggtaatgttggggagggttttggtgtttttatttttttgatagtttttgttgttgtttgtttttgtgattttggttgttttagggggtgggagttggtgtttttttggttttgatttgtgtttttttggtggttagttatgtggggtttttttttttgttttatttatttgtgtttgttttttttttatttatttatttatttatttatttagagatagggttttattttgttatttaggttggagtatagtggtgtgattatagtttattgtagtttttattttttgggtttaagagaattttttattttagttttttaagtagttggaattataggtgtgtattattatagttggttaattagaaaaaaaaaatttggttaggtgtagtagtttatgtttgtaattttagtattttgggaggttgaggtgggtagattatttgaggttaggagtttaagattagtttggttaatatggtgaaattttatttttattaaaataaaaattagttgggtgtggtgatgggtatttataattttagttattagggaggttgaagtaggagaattgtttgaatttgggaggtggaggttgtagtgagttaagattgtattattgtattttagtgtgggtgatagagtgagattttgttttaaaataaaaatataaattttgagtttgggagggtttaggttgtaatgagttgtgattgtgttattgtattttagtttgggtgatatagtgagatgttagatggtgttttaaaaaatttaaatagaaaaatgtagaaaggattgttgtttttttttttgttttttagagggtagaggatttttggtttttgttttttgagtattaggttgagttttagattttgggatggtttttttagtttgtagtttttggtagttttgggttatatttttgggatttttagggattggtttgggattattgggggtggtggttgtggttttggttatggggagggaggtagagttgtggggtaggtgtggggtttgttgtgttgggtatgtggggtgtgtgttagattttggatttggtttgtggggttaggttgtggtgtatgatgatgttatgttgtttttttttttttattttggttttttgtttggtttttttttgggttggtatttttggggttatttttgtttgtgtttgttgttgtggggtttgggttttaggtagtttttgtttgttgttgtaaataggtttttaaggtgtatggtgaggagatttttaggttagagatgggtgagagtggtgggtgagtagattgtgggaaggtagttgggtttttatatgtggagttttttttattatgtgtatgtataggtgatttttgttgtgttttgatggagggtgttgggattggggagggttagtgtgatagttttggtgtttattgaagagttgtttgtttggtttgttgttttggtggttgttgaatttttttaatgttttaggatagtaggtgttgtggttttatgattgtttttttatatggatgaaggggtggtgtataggttggtggagtttgggagagttagggtagtttgtggttatgtggttatgtggttggtgtggggttgaggtttttgtatagttgatagagtgtttggtgtttttaattagtaagttatttatgggttgggtattggtggtttagtatagagaggtaataagggtagattttttttggtaaggttgattggtgttgggttgtggttagattaggagattgtagtttagtttgagggaggtattatgtttgttttttagagtattgagtagagttttttatggtattttttgttttgggtatagtaggaggagttgttgattaagtttggtattttggtgtgttttgagagttgtttgggtataggttgtggggttgttttggttggatggggtatttgtgttttttggtgtggttttagggttttggtggttttgattgaggttttgggggatagaatgtagttttttgttttttattttttttaagaaaggggttgttttttaggattggggttgtgttagttataggtttgtggtttttatgttttgggtgttgttgttttggttgttttagggtgggttttgttttgtatgtagtgagtggttttattattttttttttgaattggagttgagtgttggtaatgtttagataattggggtgtgtgggttttttgtgttggatttttttgtatagttgttttgattttttatttagtttggtttttgtgtagtaaggagtggtttgttgttttttttatgttgttttttttatgttgttttttttatgttgttttttttatgttgttgttttttttatgttgttttttttatgttgttttttttatgttgttgttttttttatgttgttttttttatgttgttttttttatgttgttttttttatgttgttttttttatgttgtttttttttatgttgttgtttttttttatgttgttgtttttttttatgttgtttgttttgagtttgttttttttgaaggtaattattttgtagtagtgagggttttttgttgagtatgtgtggttgtgattttaggagtgttttgggttgagaattttaaaagggttttgtttaggtttggttttgggtttttgggtttttgatgtgagtttttatttttaggttttggtggtttggttttaggaggttaaggttgtagtgagttgtgtgtgagttattgtattattttgggtaattagattttatttttaaagtttaaaataatatttttgtaagggttttgggtttttgagtttatgaatttgtttaggttttgtagaggtgagggtggttttagagtggttggggggttgtggagattagaattagggtagaagggtagggagggtgggggttttgttgaggttttttattgttgatttttgatttttggtttttttttattttggtttattgagagaggttggtatagtgtagattgtggggttagtgatattttttttagtgtttttagttatagaagggttgtggtttgtttttgttttttttatttgtgttttggggttatgtttgaattttaggttttgttttgattttattgaaatttttttgaagtgtagatgtttttttgatttatttgggttttgttaggatgattttgaaaggtgttttttagtagatatattttgttggtgattgtttggttttggggatttgggtttttatttttttttttggagttggtgaggttgtttttgttagttggtgataattatagggttaaagggagggtgtgttttaggaggtttagtttatttttgtttgtatttgtggttagtggggtgtagagtttgtgaaggtattttttggagtgggggttgtaaagattatggttattgtgttatttataggggtttaggttggatgtttgggttgtgttgttttggtagttaggttgaggaatgtgtaggtgtggttgggagtttgttggttatagttgtatttatgtttttttttgagtggtgatggtggggagaggtttggttgtttatgggtagattgtttgggtttttatagaagtttgttgttagagtagatttttggttttgggtttttttgttttagttggatgttttgagttttgttgggtttagtttatttttgtttattttgttaggggtagtttagagtttttgttatgtggggttgagtgtagggaaggtagtattatggagtttgtttggttttatagaatatttgtgttgtttgtggagattttttgtttttgtgttttttatgaagaggtaggttttttttttttttgaattaaaagggtttagatggagtataagatttaggttatatttataagaataattgatttttttgttaggtagagtagttagtttgttttggaggttgtgttgtggtgtggggaggttttttgtttagattagtttgtgttttttttaggttttggtttatgtatttgtttttttgtaggtttgagtatttgtttttttatgtttaggatgatttggttttgagtttggttgggattttttgttatttgttgtttataggtttggtgatagagaaagtagtgttttggaatagtagtttggttgtggggtgtttagttttttttgtaggattttgtgtggtttaaggggtttgttgagtttttaatgggtaagaggggttttgagttatggatttattttgggtggaggtagtttttattgttgtttgttttaaatgtttagttttaggtttttggttttgtagttttgtagttatagatgggtgttttttttaggttgagaggagggtggggtttagttatttaggattttatagggtggttttgatgagtatttttttttgtagttatatttatttgtttgggtttatggttatggttggagagtggttttgtgtgtgttgtatttttttgaatttggttggttagtgttagtgttttatttgtgaggttttttggtataagtttgattttaattatattttgtggtttagtgtggaggagtagaaatggttttgtgtttgttgtattttttgtaattttttgggtaaggaggtttgtgaggtgtgtggttttattttggagtttgtgtttggggttgtttttttgttagtttttaatggggttttttttaagttatttgttattttgggggagtttaagggtagttgttaggaggaagtaggtttagtgaggattgtggggttggtggttatggagtttgttagggggtagtgtgaggataaggatgaggaggagaaggaggagtaggaggaggaggagggagtggtggagtttagagggggttgggtgtgtttgtgttgtatgttgtataatatgtttgtggttagtttttgttttgtttgtgggggtttatgtaggtttttgttgttatggattttttttgaggttttggtggttttggaagtggtggttttggttggtttttatgttgtgtttgttgtgtttttatttggtttttttggggaaggtgttgaggttaattttttagttattagttagggtttagttgttgaattagagttgtttagggttttgttttttagtttttttttgtttattttgtagaataattttgtgttgtgtagttgatgtgaggtttttttttagttgtagttattggtgtttgaggttgtttagttgttattttttgttggttgtaggggagttttttagggtttgggttgggttggggttttttgtttagtagagttgttgtttggtaagtggttgagtgtgttggaggaagaggttatggagggtggtattagttgtgtagaggttggtagttttattttgggtagtgatattattgatttggttggagatattgtgtgttatatgtttgttagtttttttagttttgattttattatttggttatgtgttaagtgtatgtttagaaattttatagtggtttttaggtgtttggtttgtggttgttttaaattgtatggtttttaggagtatggtgagttttttatttattgttttgattgtggggttgataagtttagtttttgtggtagaagttgtggatgggtgtttttggtttagaaggttgtttgtgttttgtttgagtgtttgggttagtgggtttgttttgtttgtattttgtttaatgtattgtgggttaagtattgtgttgtttgttatatgttttagtttttggtggtttagtggtggggggttgtgtttttgaggtgtagggagagtatgtatgtggagtagtggtggtagatagatgagggtgaggttaaggtattttgggagaatattgtggttttttgttgggaggtgaggtgtttttttgttttttttttgtttttgagttttttgtttttgtttttttttttttaggttttgggttttggtgatgggttggggaggagtttataaggtttaagatgtgatggggagggtagtattttttgttttgaggttttaagtttttaatggttttggggtttagtttggttttttgatttttggtttttgttggtgattgagatgtatgatttttattttttttaattttttattgtggttaggagggttttgagttttgtttgatgtgttgtaggaggtgagggttttttaggggtagtgtggagattttgttgaagtgtgaggttgggatgtatttgtgttttgttttttagagtttaggatggtattatttatgggttaattggggtgtagtttgtattttttttagtagggttagggttagagttgtgttgttatttattgggggttgtgttgtttttttgggtttatatgttttttgttttttatttgttgttagttggtggtttttttattagggttgagggtttttttgatatagggttggtgttaggtttgtggttgtttatgttttatttgtttttttggggtttaggtagtgtttttgggtgtttttttgggtggggttttgtttttgttaggtggagtgaggttattttgtttagtttgagtatatggttgtggtttttgtagaataatgtgagttttgtggatgatagttttttttttgggtttgagtttgttggtttttttgtgggtgatagtgtgtagtagtgtgtgaggtagtggttgtgattttaggagattaattgttttgtttttagggattatagggttatgtggtttgtgttttatatattgtggtttttagatattttgtaggggttgttggggaattgttggtgaggttttttttaaggttggggtggggtgggtgggtgggtgattggttgtggtttttgtgaggttattttgaggttttgtgtaggtttttgagtgttttggtggtgttggtggagtggttggatttggtggagtgggtgatggttatgtgtagtttgtgtgtagagggtgtttattaggtgtggttgtgtaaggatggtatgtggattatggtgttggtggatgatatgttgttttgtgatgaggttggttgttttttttttttataggtggggtggtttgtagggtgggtatgggtggtaggggtagtttttgattttagttttgaaaataaggttggttgttttttttttttttagggtgggtagtgtggggggtgggtgggggtggtttttgatttggttttttgtaggtgtagtggaagtagttgtgggtggtttttattgagaaggtgttggttaagttgtatggtttttattttgtgttttaggtgggttgtgttattgaaggtttggttatgtttattggtgttttttgtgagagtttggtgttgtagtttagttttattaatttttgtgaggagtttgttgatattgattttatttgggttaaaatgttgagttttaaggaggttgggtaagaggaggggtattgtgtggttagttgtgttgggaggagaggtgaggtggagtggtgggagatgtggggttggtggtttttgatttagttttgtttttatgaggtgtttttggtgtgggttgattttgtgtggttaggttatagttttaattatttttttttttttgggtggggttggagttggtttttttatgttaggaaggttatattttggttaggttgtggggtgagattgatgttgttattttggagtaggtgtgagtggtgtgttgagtttgatttgggttgtggggtgagattgatgttgttatttgttttggggtaggtgtgagtggtgtgttgagtttggttatattttggttagtgggtttgtgttttgatttttaggggtttttttggagtgttttggtgtgagtattttgaagtttttggagtttt

SEQ ID NO: 278 - DNA, 23717 bp, Artificial Sequence
  chemically treated genomic DNA (Homo sapiens)
agggttttgggagttttaaggtgtttgtattggggtattttgaggaggtttttgggggttgaggtatagatttgttgattagagtgtggttaaatttgatatgttgtttatgtttgttttgaggtggatgatggtattagttttgttttatggtttaggttaaatttgatatgttgtttatatttgttttggggtgatggtattggttttgttttatggtttggttaggatgtggtttttttggtatgagaaggttagttttagttttgtttagggagggggaggtgattggggttgtggtttggttatgtggggttagtttatgttaggggtattttgtggaagtagaattgggttaggggttattagttttatattttttattgttttgttttgtttttttttttaatgtggttgattatgtagtgtttttttttttatttagtttttttagaatttagtattttggtttagatgaggttagtgttaatgggttttttgtgggggttagtggagttgagttgtagtgttaggtttttatagggggtgttggtgagtgtggttaggtttttgatggtgtggtttgtttggagtgtaaagtaggagttgtgtagtttggttagtgtttttttgatgagggttatttatagttgtttttgttgtgtttgtagagggttgggttagaggttatttttgtttgttttttatattatttgttttgggagaagaggaagtagttggttttgtttttggggttggggttagaggttgtttttgttgtttgtgtttattttgtaggttgttttatttgtgagaagaggaggtagttggttttattatagggtagtatgttgtttattagtattgtggtttatgtgttgtttttgtatagttgtatttggtaggtgttttttgtatataggttgtgtgtgattattatttgttttattaggtttggttgttttgttagtattgttagggtgtttaggaatttgtgtagagttttagggtgattttgtggggattgtggttggttgtttgtttatttgttttattttggttttggagaaggttttattagtagttttttagtagtttttgtaggatgtttgagggttgtagtgtgtggaatatagattatgtggttttgtggtttttgaagatggagtagttgattttttggggttgtagttattgttttatatgttgttgtatgttgttatttgtggggaagttgatagatttgggtttgggagggaagttgttatttatgaagtttatattgttttgtagagattatggttatgtgtttaggttgggtagggtggttttgttttatttggtagggataagattttatttaggagagtgtttaaaagtattgtttgagttttaaagggatgggtggagtgtggatagttatagatttggtgttggttttgtgttgaggaagtttttagttttagtggagaggttattggttggtgataggtgaggagtaggggatgtgtgggtttagggggatagtgtagtttttagtgggtggtagtatgattttggttttggttttgttggggagggtgtaggttgtgttttagttgatttgtgggtgatgttattttggattttagagggtggagtatgggtatattttgattttgtattttagtggggtttttatgttgtttttgggaagtttttgttttttgtggtatattagatggggtttggggtttttttggttatggtggagggttgaggggggtgaaggttgtgtattttggttattagtaaggattaagggttaggaggttaagttggattttagggttattgggagtttggagttttggggtggagggtgttgttttttttattatgttttaggttttgtgggtttttttttagtttattgttagagtttaaagtttaggaaggggagggtgggagtaggaggtttaggagtaggaagagggtgagggggtgttttattttttggtagaaggttatgatgtttttttagagtgttttggttttgtttttgtttgtttgttgttgttgttttatgtgtatgttttttttgtgttttaggggtgtggttttttgttgttgggttattaggagttgaggtgtgtggtaggtggtgtagtgtttggtttgtagtgtgttgagtagggtataggtagggtaggtttattggtttgggtgtttgggtaggatgtgggtggttttttgggttgaggatatttgtttgtagtttttgttgtaggggttgggtttgttggttttatagttggggtagtgggtggggggtttgttatgtttttggaagttgtgtagtttggagtagttgtaggttgagtatttgggggttattgtggggtttttgagtgtgtatttggtatatgattaggtggtgaagttggggttggaggggttggtgggtgtgtaatgtatggtgtttttggttaggttaatgatgttattgtttgaggtggagttgttggtttttatgtggttggtgttattttttgtggtttttttttttagtatatttagttgtttgttagatagtaattttgttaggtgggaggttttagtttagtttgagttttggggggtttttttgtagttggtagagggtgatggttgggtagttttaggtattggtggttgtagttgggggggaattttgtgttggttgtgtggtatggggttgttttgtagggtggatgagaaggggttgaagggtgggattttgggtggttttggtttggtagttgggttttggttggtggttggggggttggttttggtattttttttggggaggttaggtggaggtgtggtaggtatgatgtggaagttggttggggttattatttttgggattattagggttttaggagggatttgtggtagtgagagtttgtgtgggtttttgtagatggagtaggagttggttatgggtgtgttgtgtagtgtgtaatgtggatatgtttagttttttttgggttttgttgttttttttttttttttttgttttttttttttttttttgtttttgtttttgtattgttttttggtgggttttgtggttattagttttgtagtttttattggatttgtttttttttggtagttgtttttgggtttttttaggatggtgggtggtttggggaggattttgttgaggattggtaggaaggtagttttaggtgtaggttttggggtgaagttgtatattttgtaggtttttttgtttaggaagttgtggaaggtgtagtgggtgtagggttatttttgtttttttatgttgagttgtaggatgtggttgaggttgggtttgtgttggggagttttgtagatggagtattggtgttggttggttgggtttaggaaggtgtagtgtatataggattattttttgattgtggttatagatttgggtgagtgggtgtggttgtaagggaaggtgtttattagggttattttgtgaggttttgagtggttggattttattttttttttggtttggggaaggtatttgtttgtggttgtagagttatggggttgagggtttagggttgagtatttgaggtaggtggtggtgggggttgtttttatttagaatggatttatggtttagggttttttttgtttgttggaggtttagtagattttttgagttatataggattttatagagagggttgagtattttatagttgggttgttgttttagggtattgttttttttgttattaggtttgtggatggtagatagtagggggttttggttaaatttaggattaggttgttttgggtgtggaagaataggtgtttagatttatggaagggtaggtgtatgggttggggtttggggaaggtataggttgatttgagtaaggggtttttttatattatagtatagtttttgagatagattggttgttttgtttggtagaaaaattaattgtttttgtaaatatggtttgaattttgtgttttatttaaatttttttggtttaggaagaaagaaaatttgtttttttataagaagtataaaaataaaaagtttttgtgagtaatatgggtgttttgtggagttgagtgaattttgtgatgttgttttttttgtgtttagttttgtgtggtgagggttttgagttgtttttggtagagtggatgggggtggattgggtttggtgaggtttagggtgtttagttggagtagagagatttaaggttgggaatttgttttaatagtgggtttttgtgaaagtttaagtaatttgtttgtagatagttaggtttttttttgttattattatttggagaagggtatggatgtagttgtggttggtgggtttttggttgtatttgtatgttttttggtttggttgttgaggtggtatagtttaggtgtttggtttgggtttttgtgggtggtatagtggttatgatttttgtagtttttattttgggaggtgtttttatagattttgtattttgttgattgtaggtgtaggtagaggtgggttgggttttttgggatatattttttttttggttttgtagttgttattgattagtaaggatagttttattagttttagagaggagaatgagaatttgggtttttaggattaaataattgttagtggggtgtgtttgttgggagatattttttggagttattttggtaaaatttaggtgggttaggaagatgtttgtattttaggagggttttaatgaagttagaataaggtttaaagtttaaatgtggttttgggatatgggtgaggagggtgaaggtaggttatggtttttttgtggttggagatgttgaggggagtgttattgattttgtagtttgtgttgtgttggttttttttggtgggttgaggtggaagggggttaggggttaggggttagtggtgggagattttggtagggtttttattttttttgtttttttgttttggttttggtttttataattttttagttattttagggttatttttatttttgtagggtttgggtaggtttatgggtttagagatttgaaatttttataaagatgttgttttgaattttagagatggggtttgattgtttaggatggtgtagtggtttgtgtatggtttattgtagttttgattttttgaggttagattgttaaagtttggaagtaaaagtttgtgttaggagtttaaagatttaaagttaggtttgagtgaagtttttttggaatttttaatttagaatgtttttgaagttgtagttatatgtgtttagtaaggagtttttattattgtaggatggttatttttgaagggagtgggtttagggtagatgatgtgaggggagatgatgatgtggggggagatgatgatgtgaggggaggtgatgtgggggaggtgatgtgggggaggtgatgtgggggaggtgatgtgggggaggtgatgtgggggagatgatgatgtgggggagatgatgtgggggaggtgatgtgggggaggtgatgatgtgggggaggtgatgtgggggaggtgatgtgggggaggtgatgtgggggaggtgatgggttgttttttattgtatagaggttaagttggatggaagattgaggtaattgtatagaaaaatttagtataaaagatttgtgtgttttagttatttgggtgttgttgatatttagttttaatttaaaagggaggtgatgaagttgtttgttgtgtgtaagatagagtttgttttgaagtagttgggatagtagtatttggagtgtggaggttgtgggtttgtgattggtgtagttttagttttgggaggtggttttttttttaggaaaagtgaggagtaggaagttgtattttgttttttggggttttggttaaagttattagagttttgaggttatattgagaaatatagatgttttgtttggttggggtagttttgtaatttgtgtttagatagtttttggggtatattggggtgttagatttggttggtagttttttttgttgtgtttagggtgggggatattatggggggttttgtttagtgttttgaggggtaggtgtggtgttttttttgagttgggttgtagttttttggtttggttatagtttggtgttggttagttttgttagggggggtttatttttgttgtttttttgtgttgagttgttggtgtttggtttgtagatgatttattgattgagggtgttaggtattttgttagttgtatagggattttagttttatgttggttgtatggttgtatggttgtaggttgttttggtttttttaggttttattagtttgtgtattatttttttatttatgtgggggagtggttatggggttatagtatttgttgttttggggtgttgggagaatttagtggttattagggtagtgagttaggtaggtagttttttagtaaatgttagggttgttgtgttgattttttttagttttggtgttttttgttggagtatggtaggggttgtttgtgtatgtatgtggtggggagggttttgtgtgtggaggtttagttgtttttttgtagtttgtttgtttattgtttttgtttatttttagtttgggggtttttttattatgtattttgggggtttgtttgtagtagtagataggagttgtttggagtttaggttttatagtagtgggtatgggtaggagtggttttagggatgttgatttaggggagggttaggtaggaggttagggtgaaagagaaagagtggtgtggtgttattatatattatggtttgattttgtaggttaggtttaaagtttaatatatgttttatatatttggtatagtagattttatgtttgttttgtggttttgtttttttttttatagttagagttatggttgttatttttggtagttttaggttagtttttggggattttgggagtgtggtttgaggttgttgggagttgtagattggagaggttattttgaggtttgaaatttggtttggtgtttaaaaagtaggggttgagagttttttgttttttggaaaatgagaaagggaatgataattttttttatatttttttgtttaagttttttgagatattgtttagtgttttattgtgttgtttaagttggagtgtggtggtatgattgtagtttattgtagtttggatttttttaagtttagggtttgtatttttattttgagatagagttttattttgttgtttatattggagtgtagtggtgtaattttggtttattgtaatttttgttttttaagtttaagtgatttttttgttttagtttttttagtagttaggattataggtgtttgttattatgtttagttaatttttgttttagtagagatggggttttattatgttggttaggttggttttgaatttttgattttaggtgatttatttgttttggttttttaaagtgttgggattataggtgtgagttattgtgtttggttaaattttttttttttaattaattagttatggtggtgtatgtttgtagttttagttatttgggaggttgagatgggaggtttttttgaatttaggaagtagaagttgtagtgagttgtgattatattattgtattttagtttgggtgatagagtaagattttgtttttaaataaataaataagtgaatgaatgaaaaaaagataggtatgggtggatgagatagggagagaggttttatatggttggttattagggaaatgtagattaaagttaaggggatattagtttttattttttgggatggttagaattataaggatagataatggtaggagttgttgagggagtggagatgttaggattttttttagtgttgttggtgggaattaggtaatgtagttgttgtggaagatggtttggtagttttttaagatattatgaaagtttattatatgttttagtaattttatttttaggtatttatgtaagataaatgaaaataggtttatgtaaaattttgtaaataatgtttatagtattgtttatagaagttatgtggaagtagttttagtgtttatgaatagataaaatgtggtttattttgtaaaggagtagtgaatgaaattgttttgggttgtaggtgtatgaatttggagggtatggtgttgagtgaagaggttagatatggggttttatgttttgtggttttatgtttatgtattttttgtataaggtaaatttagttagttatgttttgtggttttatatttatgtattttttgtataaggtaaatttagttagttatgttttgtggttttatatttatgtattttttgtataaggtaaatttagttagttatgttttgtggttttatatttatgtattttttgtataaggtaaatttagttagttatgttttgtggttttatatttatgtattttttgtataaggtaaattaagataggaagttggttagtggttgtttggggttgagggtttttttgggttgtgggatgttgtaatattggattgtggggttgggggtttttgtgggttgtggaatgttgtaatgttggattgtaatgatggttgtataattttataaattattaagagtgattaaattgtatttttttaataggtgagtttggtaagttttattttaataaagttgttgttggtatatgtggagatgtttattgggaggtggttggtgtggtaatattaggaattgggaggtgttttggtgttattatatgtaggaggagtatagattttttttttgttgattattaggttttatatggtttttttttggttttgtttttgttgtgtttttttgtttattagggtaatttgtagatagggttttagggtttttttatatggtttttttttggttttgtttttgttgtgtttttttgtttattggggtaatttgtagatagggttttagggtttttttatatagtttttggttaattttttgtatttttagtttttgttggttggagtttaggttttagtgtggatgttatttggaggttggtttttaggtttggttatttgttatggttttgtttattgtttgtagttttatgtttgttttttttatttgggggttaatagatagtaggatattgttttttgtgggagttgttgttaggtgtagtttggtaggtttttttgagtgtgagatgtaggtatattgtttttagaagttaggtttggatttgttgtgagagtaatggtggttattgtagtattggttttgaggttttgggtttttgagtgtttttgtttttagtgagggttaggatggggtgatggtaggagtattggtggggtttagttagtttagattttattatttggattgtttttagattaggtattttagaatttgatggtagtttttgagggatgtagtgggtagttaaggttatggtgatagttgtgaggagttagtatgtggagtttggttattaagttatgtggtttgtgatttttgggggggtagtaggtggagtttagtgagtgttggtagttttgaaattgtgggtagtaggtaatatgtttagagtttgtagttgttagtgattttagtttaaaaagaagttttaggaatagtttttttgtgtggagtagtatagtttgtgagaaatatagggttgttgggattgggtgtattagtttttatttttattattaattagttaggttgaggttggggttttagatttgtttagtttttgtattttggggaagagagttgttataattggaaggagtagggatttatttttttgtaagtatttttgttaaggagggggtattttgagaatgaggttttttgtttttgggagttttttggggttatttttttttattttttatttttgggtttggggttgtgggggttggtgttgttggttgattagggtatttttttagatgggtttttttgggttgtttttatattagttagttgttgttgggggatttgggtagggtggttttttggggaagttgtggtttgatttggtttttgtggttagggaggaggtggagttttttatggttttttggttggtggttgtgttgagagttggatttggttatttttggttagtagtgggtgaagtggagtatggagggaagagataggatggttggttgggtagagtgatatataataaaaataaatagatagagagagaaaatagagaagaaatagtatgatttatatatatagtttgggaggattttttagtatgtttagttgtttggggtaggttgaggggatattttagtgtagggtttgtggtttgattttggtatttatagggttttttttttggggttttaggatattttttggtttttaaaagtttggtattatgtttgtggtatttagagatgttttattttttggtgagaaaagagattatatgtttttgttttattatagaaggaagggttaagagaatgtttatttaaaggtaggtaggggaggtagtagagggtgtagggagttgttgtaggttaggttggatgaagatttggggggttgttttatatagttgtttatatgttattttggagatttttagaaggatgggagtttgattatgttttgtgtatttatagagttaggttttgagaaataaggattttgtgaggttatggttgagggtgggggttggtttttggggttttttttttagaggggtgagagttatttttgttgggaggtttgggagaggtataggttgtttagggtttttgatatgtggtttatttgtgtttttgggaaggttattttattttttttggttgaggagaaattaaatatagttgagaatgttaattttgagatgggaggattttgtttgtgtaggtagttgttttttttagagtttgatatatttttttttttttgttaagattggggttaagatggtgttttggtaggttggttggttgtgggttgattagtagtttttgttgttatatatgttatagttttttttttagtttttgattaagtttttgggatatatagttagtgttagggtagagtttaggaggaaagggttaagtaagtgttaaagttgttgtgtgtgggggattatttgagtttaagagtttgagattagtttgggtaatatagtgagattttgtttttatagaaaattaaatattatttgggtgtggtggtgtgtatttgtagatttagttatttaggaggttgatgtgggaggatggtgtgagtattatagttgtattttagtttgggagatagagttaaaaaaaaaaaaagtattaaagaatatattttttggagtttagggaggtttgggggtagttttaggtgagtgggttggggggggtgggggtgtagttttagttttttttttgtgatgatggggagtagtagagggtagggatgtggggggtttttttagttagtgttttgatatttgggaggggtttgtagttttgaggttataggggttgagtttagtgaggtatgagtatttgggattgtatagtagatgtgttagtttttttttggtttttttttatagttttggggatagaagttttaagggtaggggttgagggggtgagatagagaattttggatttttttttttttgaggtttggggtagaagttgttgagttttttgtgtggtgataatgtttgtttgaattattttatttggtatgagggtttgttttttttgaaggtgttggggttgtgggagggttgaagtattgtgggttttgtattttggagattttgttattttgtggtggtttaggtttgttttgtaggtagaatggttataggatatatggggttagtgtggggtgtggattagagtttagttttaagtttggtttagtttgtaagttaataatggtttttatatttttaaatggttggaaaaaaattaaaaaaaaaaataatattttgtgagaggtgggagttttatgaaatttaggttttggggttagtagggtatagtttggtttatttgtttgtaggtgtttttttatagggattattttgtatttatatttgtttttgaaggggtatttggtggttatgttggagagtgttgtgtagtgtggatggggttatgggagttgtggtggattttttggtatttatgtaagataggtggaaaggaatagataaaataagttttggtgatgtgttttgtgtgatttgaggtatttgagatattgttgtgtttgtgtgaagtgaatgtaaaatatgatggagatatttaggatttgttttttaggttgggtttttggatgtgttatattataggttttgtagttattagtgttggtggtttttataaggggtagtgtttaaatatgtaggatgtaggtgaggtttatggggttttgaatgttatatggaagtaaggttgggagtttagtatgtatggagtaggtttgttagtagggagtttatgtattaatttagggttttttgtgtggttatgttagatgttggaattatttaaatggtttttgtgttttttagtttaggttatgtaggagttttttatgggagatgggttgggtatttttgatattttttttttgtagttaaattttgagtgggttagggtggggtagggtttgggtgggagtggtgattagtggaggtgttatgggatagaagttgtttgtattgggttttgagttggtttggttttgataggagttttgtttgttttgtgtgaggattgtatatttgttagggttaattttagtttttttgttatttatttatttatgtatttatttatgtggtatttggggttatgtgtgttgttagaaatataggtttttattaggttttgtttgttttttattgatgtttttaggtttaaggtagaagtggtgtttagttgtatttagggtaggaagtgagttgtttattagttttttgtttttttgtgtttatttagaaaattttttttgagttggagttagttttaggtaattgattttgtgggttttatttggataggagggaggtttgttttaggagagtagggatagtatagtttttttttgtgggtgtttggaagagaagagaggattttgtagagaaaagtaaatgtttttgttatagaggttggatagttggttttgttaagttttttttggggtttttttagtatatgttaggggatttttagagatggtattgttgaattgttttgatttgttgttagaggagttaagagttttgtgaggggtgttgggggttttgttttggttggtgaggtttattaaggagtaagagtttttgggatatagttgttagttatgtgttaatttgagggttttattgtaagggtgattgtgggaaattggtattgatgttttttttgaaatttattttgttggtttttttgagtgtagttgtgggttttgggtttttttgtgttttgtttatttatgatggatagatgttagtataggatgagtagttatggaaaaggtttttaggttaggtgtagtggtttatgtttgtaattttagtattgtgggaggttgaggtgggtggattatgaggttaggagtttaagattagtttgtgtaagatggagaaattttgtttttattaaaaatatataaaaaattagttgggtgtggtggtgggtgtttgtaattttagttatttgggaggttgaggtaggagaatggtttgaatttgggaggtggaggttgtagtgagttgagattgtgttattgtattttagttggggtgatagagtgagattttgttttaaaaaaaaaaaaaataggtttttagtttgtgtttttttagagggagggaattgtatttaggaggaagattttgatgggagggttttaggaaagaggagtaagaagtggtgggaaggagggagggtagtattagtagttatttttagggatagtgtttagttagggttgattgtattttggttgtgggtgttggttttggttagattttggtaggggggttattatgtttagggttattgaggatagtagggatagggtttgttgtggttagttagaggtttttgggaggaatgtttatttgttatttttaggtttggtttattttagggtttgggtatatgtgaattatttagtgtagtggttttgaggatgtaggttaggttagtttgtggtttttattttggttttttgtttgaataattgggggggggggggggtgtgtaggggtattgttattaaggagtgtgtttaggttaggttgagggatagtagggtgaggtttttgtagagtatgttgaattttgatttttgattttagggatatgttttgggttgttgttgtttttgtagggtttgttgttggttaagtatttgtgttgtttttgtgagttgtatgtgttttttgggtttttgttgtgggttaggttgttttaggtgtttgtgaatgggaattagtaggagttgtgattatagggttgatttttagggtggtgttttaagagtggttgtgatttatgattgttatagagttaggttgtagttatgtttgtttttgggttttttggaggggtagggtgtggagggttttgggttgtgtggatttatgtttgatttttataagtttaattgtgtagttttttgttttttttgggagttgatgttttagttttaaatggggtggtggtttagatttagttttagagaattgtagaggtgaggttgttattgttttgtggggataagtggttaatgagtagggttaattggttggtttttgttttgtatgttatatatatattttgtgagggtagtaaggagtatttagttaggggatgtgtatgagaagggttaggatgattatattgtttggggtttagtatagggttgagttttggaggtgattattgttgttttgttttatttgtggttattgaggtttgttgggggtttttggtgttggttttgatagtttatttgtggtaggatagggttttgaggtgttttttggtaggtggtgggtttagtgggggtgatttgtggggatggaatgtatgtttttgaggttttagtggatgtaggtaaaggtattttttggggttagtgtttttatttggggagttgggagtttatatgggagtagggttggtatagtgatttttagttttgtgtgggtggtatttatagttgtgtttattttgtatatattttttattgttttgttaattaattatgtatatggttgtatttttgagtttttttttgttttgtaggtgatataggtgtgttttatttatatagtatttgtttttgggttttatatttttgttaattttttatagagttattttgttattatgggaattatagtgattttaataaggatgttttggtgttatttttgtttgagttgggggtgtggggggtagtagatggaaagtgggggtttttgtgtttaggtagttggtggtttggttttgttttatggtaattttattgtgttttaaaattgtatttattagattagaggttgttggtttaggtaggaaataagagttagttattattgggatgaagtttagttggtgtttataatttgaagataggtaattttgtttttgtttttattgatgttaaggtttttgtggaggagatgattttaaggataggaagtttttgtatgagttgggtgggagggttgaggatagggttttttattgtttttataagaaataaggttagggttttgttttgggggaggatgtggattttgattgtttgttttaaatgataattggtaggatagtattttttagaaataggtgtaggttgttttttagggattaggtatttttttggttgaggatagtggtgggggttgtgtataggttttttattagttttagttttagtgttgttgtggggatggggagttttatttgggggttggggttatagtataggggaggtttttaaagggataaatatttttgttgggattttgggttgtttttattgttgttttttatgataggattatggtttaaatggttgggagaatgaggttttttagggtaggtagggttgttggtttttaggggttttgtgaattaagggttttgagaggttttttagttgtgggtattttaattttgttgttttataaatagttttgtagtgtaagtaaatttataaatgagttgtagggtttgggaataaatttatttgaagttgtagtaagtttttaggttttttttgtgttgtgtttgggttgttgtttagaaagggaggtatttaattaggtattttagtttttattaggaggattttgattttggaatatagagttttgtttttagttttttttgtaggagttagagttttgggaaattagttttgggagattttttgttttagaagttgtttgagtttttgtttttgggtgtttgtttgagtgttaaaggtagtttggggagtagtaggggtttagtaggttttttattattttggtttaaggtttttgatttgtttagtgtggttaatttttggttagttaggattgtagatagggttatttaagattttgtttggattttttatggtttgattttgttataaggagtaggttgtgggtaagagtttatgagtggggttgtagagtagtattagttagggagggtggttgagttttttaggtattgttagggaaaggtgtttagtttgggtaggtataggtatatagttaggtggttatttagatttttttggattttagtttgagtgttatttggttattatagttgttagtagggtggttattgttttgagttaggtggttttgtttttttaaggttatgttttttatggtggatttattgtggtgggtaggatgtttatgttttttgttttgttttttttgggttttgtgtagggtttattatggattttttatttagttattatttttttttttgttggttttaaattttttattttattttttgagatagagttttgttttgttatttaggttggggtgtagtggtgtaattttagtttattgtagtttttgttttttaggtttaagttatttttttgttttagttttttaagtagtttggattataggtgtttgttattgtgtttagttaatttttgtatttttagtaaagatgaggttttattatgttggttaggttggttttgaattttagattttaggtgatttatttgttttggttttttttagtgttgggattttaggtatgagttattatgtttggttttttatttttttttgtgattagtatgaggatggtgtgtaggtgtgtttagtggtataggtattatttgttttttttttttttttttttgatagagttttgttttgttgtttaggttggagtgtagtggtgtgattttggtttattgtaagttttattttttgggtttatgttatttttttgttttagttttttgagtagttgggattataggtgtttgttattaggtttggttaatttttttgtatttttagtagagatggagttttattgtgttagttaggatggttttaattttttgattttaggtgatttatttgttttgattttttaaagtgttgggattataggtgtgagttatagtggttggttttttttttttttttgagatagggtattattttgttatttaggttggagtgtagtggtgttattttgatttattgtaatttttgttttttgggtttaagtaattttagtgttttagttttttaaatatttgggattataggtatatattattatgtttagttaatttttgtatttttagtagagatgggggttttgttatgttggttatgttggtttttattttttgattttatgtgatttatttattttggttttttaaagtgttaggattatatgtatgagttattgagtttaattgaattttattttttttttttttttttttttttgagatggagtatagttttgttgtttaggttggagtgtagtggtgttattttggttaattgtaatttttgttttttaggtttaagtaattttatagttttagttttttgagtatttgggattataggtatatattattatatttagttaatttttttatttttagtagagatggggttttgttattttggttaggttggttttgaatttttgattttaggtaatttatttgttttggtttttgaaagggttgggattataggtgttagttattgtatttagttttgatttttatttttaataggaaaaaaggattagataagtatttgtggtttttggtatttttttatttttttgtttgttatgtggtggtagaagtagttttggtttgggtagtttggtgattttattggtggttaagtagaagtttttgggatatagggggtatttgttattttagagaaggggatgggggttttgggagttgtgtggttttgggtatttgttattttagagaaggagatggaggttttgggagttgtgtggttttgggggtatttgttattttagagagggagatggaggttttgggagttgtgtggttttgggggtatttgttattttagagaaggagatgggggttttgggagttgtgtggttttaatttagaggaggttttgtggtatttttttttttattagttttagtttttttgtagttatttttttaggaggggtaggaattttagaaagttttaaaatttattgttttttttattataggggatagggaggtggggggtagggagtggggattaggtaggggtagaaggtgtaagaggtttaatttgtttgggggattttatttataaagggtagaggttgggtgtggtggtgtttatttgtagttttagtatttgggaggttgaggtaggaagattatttgagtttaggagtttgaggttgtagtgagttatgattgtaattgtattttagtgtgggtaatagagtatgattttggtttaaaaaaataaaatttaaaaaatgttaaaataaagggtaattttttgaagagaagtgaggggaaggttatgaggaggaatttttttattagtggagtaagttttttttatagaggagtagatgttgtagttattgtgatatttaaaaagtagtgatggttttgtgtttttttgatattttgtttaggattgttagggaggtggggatggtaatttttgaagtttttttttgattttagggaatttgataaattgttgtatttggaggttaggatggtgaggttgatgtttatgatttgatgggatttatgggtttattttggtgttttggatgagttttggggagggtggttatattgttggttttttatgtagtatttaggtaggttttttagagtgtgtaaagtaatagtttgatgtagtttattttggggggtttatggggtttttgttttgggttaggatgtttttatttttttatagattttattttgtgtattttgtgggtttagtagtagtttttgttttagtggtataatgtggttgtttatagattttatgtttagatatttttttgggttatgtattgggaggtttttatttagttgtgtgtgatttatatagtgatagggtgtggttgaatgggtttaggtttagttttaatttatagtttttttgtagtgagatatatatgtaaagattataggttagtaagtttgtttttttagatttagaaataggttgagtttaggtgtggttgtgtttatgttataggggttgttgtgttatttttttggagtatgtaggagtttttttgggttgttagaatttaggtatttagaattgtttgtggtgagggttaattttaggtgtttattgattgtttgttttgtgtatggttgtatagtgttagatattaggtttattaagaaatagaaatggattttgtttttggtgttatatttagtagggagatagggtggttttaagtgtaagtgttgtaggtagattttatagtggggagttagggattagttatagggttatatgagaattgtatagattttagtgttttttttagtgtggggtatgagaggttagtggttttatatagttgaggtatagtttggtggtgagaaaatttatatttatattgagtgggtatgagggatgtggaagggttttaggtagagaataagttttattgggtttttgggtatttttgttgtgttaggggttagagggtaggattagagggatagagtaggaaaataggagagtaaagtgtatgaggtagtttttgggttgggggttttttttttttgtgttttatgaggaaattatttaagtttattttttgtgttttttgttattttagttttatggtttagggttgagtggttatttaggatagatatagatttgataagttattagtttttttgggtttttgttattgttttttaaagattttaagttgttttgtttaatgatgttgtttttttttttagtatttgtttatgtttgttgttatgagtagaggtattatattgtgggttagagggttggattaggggtaatttggttattaatggttgagttttttattgagtggtttaggtttatgaataatatttgtggttttggaggattttttgggtagtagaatttttttttttaattgttttgtgtgaattggtggaattagtaggagggagagattaggtgtttagttttttttggttttttttttgttatgaatagttgtttttagttttggttttttatttgtggtattggggttattggagtgttgtttaaggttagggtaagaagtaagtgaggggtgtttggagagagagttagtagggtttgaggttgttatatagatgtagtattataggggattagttattttttgtttttagagattatggtttgtggaggtttagataagaggttttgtgtagttatgtagttattgagttttgggtttttttggggatttagaggttattggtttttttgttaattaaggagttttggagagttttagatatagatagaagtaggaaaaagaggggtgttttttttgtaagtagaaggattttggaggaggtaaggtatatttaatttaaggttaggttaagttggttttttgtaggatttgttttttttagataggttagaaaaataattttttttgttttattttatagttgagaagttatttagaattggaagggagaattatttttatatttttgtttagttttagattttggaaatgtggaggtaattatggggtatttttatattgaattgtgatttatgtttttgtattttttagatttgggtagaggaagagatttgggttttttgaaggagaagtatataattttttagtatttaatggagttttagttttttttattggttttatatatttaggtttggttttaggttttgggttttattattgttttttgggttttgttatttgtagtttggtaataaattttagagtagtaagggggttttgagagtttgtttggttagggttagttgattatataagagtttttttggttaggattagaggggttttttttgtagttagtgggaggatagtagatttgtaattttttagttggtgttgtagtagttttagaggaatatggaagagaatattggtatggttggtatagatggggtttttgttagtttttttatgttaggtggttgtttttaggttgttttttaagtgaggggagtgatgtttgtattaagtataatatttttaaggtggttaggattgtatgatgggtttggatataagggtatttaagggtaggtagggttgaggttgtttttggtgtgtgtggtttttggggttggttttaagtgatttatatggtttaggtttttgttgattttttgtttttttttgggtttttttgtgaagtattgtttagttttggtttttattagtttggaggtgttagtgggtggtgggttgattttattttgggggttttgttgtttttgttttggtttggagtttggtgtgtttggtttttgaggttttttgtgttttgttgagtttgtgttttttgttgttttttgggtttgtgttttttgtttggggtttttggttgggtgtttggttgggtttggttgatgggatttatttttatagtttggtggtgttgttttgtttttgtggtttgggtagtgtggttttggtttttgggtttgtttgtttttgttggttgatttataatttttgtttttggagagtggtggggttttttttgttgttggttgtgttgtttggatggttttttgttttttagttgtggggtgttttgatttggttttggttttggtttttgtttgtgtttggtgtttgttttatgttgtttttgtagtgtagtgtttggtttgggttttgtggttatggtgtgtttggggtgtatgtggtgttgtgaattgtgtgtttggattatggtttttatagggttgtgtggtgttgatggggtggaagtttggggtggtgtttgtgtgaggtaggttgggagttgtagtttttgggtggtgtttttttagtttgttgattgtttgggttattttttttgtttttgttgttggagatggttgggtttgaggttttggtttttgggaggtgttgtgttttaggattattagggagtggggtggtttgaggaggagttggaattataatttttagagggttttgtgaggggtatggaggggtggggtttgtagttgtggtgtttgtgtattagtggtgttatagatgtgtggggtttgtggggagttgggttggggttgtttgtgttttgtggggttttgggtggttgtttgattgaggatttatgattttgttttgattttgttgtgtttgtgagatttggagatttttttgtgttttttaggattgttttttttgtgatgttgtgtgttgtgtttggttttggtggttaagagtggtggtggtaaggggattgttttggtttgagatgtggtttggttttgtagtgttgtttgggtatagtttttttaggtttttttgtttttggttgtggagggatgttattaaatggttatgttgggtttaattgggatgtggtttatggtgtttaattagggtttgggggagggaagttggggtgatttttgggtttttttaggatttttgtgtaggttttattttttttttggaggttttttttttgttgttttgaggttatttttttgttagtagttgttgggttggtttttgggagaatgttttggtgttaagtttattaggttgtagggtgggatgtgagtgttgagggtagttagatttttgtttttaggtgtatttgaggagtttgagaaggtagtggttttgtgggagagggagatataggagtagggttggtttgttgagattttggagagatggttgtgggttgattttgtggtgagatttataagtgggaggttgggtgatgattgtttttgggttagaaaatttaagttagttttagtaagatttataaggttagggttagtgttttttagaggatatttatgttttaggaaagttaaggatgggtttttgttatgttgagatgttgtagtaggga

SEQ ID NO: 279 - DNA, 17265 bp, Artificial Sequence
  chemically treated genomic DNA (Homo sapiens)
gtaggtggattatgaggttaggagtttgagattagttttattaatatgttgaaattttgtttttattaaaaatataaaaattagttaggtatggtggtatatgtttgtaattttagttatttaggaggttgaggtaggataattttttgaatttgggaggtggaggttgtagtgagttgagattgtattattgtattttagtttgggtgatagaatggaatgagattttgttttaaaaaaaaaaaaaaaaaaaaagaagttttagattttggttgtgttggttgtaaaaggagagatttagtaagtgggggttgtgttgtagattgttatttataatggatgggttattgagtaggtttggttaattgggtgtttttttgttggagggttagtatattagattgtaggtggtgtgggttagtaaggtattaggggatgtgttatatatatagtttatttttgtttagttatgtatggatattttgggtttttgagtaaatttgtttttatgtggtgtgattatatggagttatagatatttagtaaggatatgtagtttgtatatttttggtattttagatatagtgatttgtattagggtttgaggtttttttagggaatttattttttagaattatttagaaataagttattttttatttgtttagtaaaggtttgttgagaggtgtatagtgtttggagtttaagttgtgttaaggtggtaggatttttagtttagtttaggatttttagtagagtttttattttagtgtggaggtttgagaatgtgaggaaggagttgtttagtatggatgagtttaggtagttgttgatgtttagtatttattgtttggtaggtgtggggtttaggtttttagttatttgtaggatgatggtagtggttagtgggtggtagtttagatttgtttaggatagggatgagaagttatttttttagtagataggatagagtttggtgttatttaatagaatgttttagaatgttggatatatgggatatttgtattgtttgtgatggtagttttttgtgatatgtgttattgaatatttgatagtagattggtgtagttaaggaatagagttttgaattttattttttttttttttttaagatggagttttgttttgttatttaggtaggagtgtattggtgtaattttagtttattgtaatttttattttttgtgtttaggtgattgttttggtttagttttttgagtagttgggattataggtgtttgttatgatgtttagttaattttttgtatttttagtagagatggggttttattgtgttggttaggttggttttggaatttttgattttaagtgatttgtttgtttttgttttttaaagtgttgggattataggtgtgagttattatgtttggttattgttttattttaattaattttaatatgagtagttatatgtggtttttggtttttgttatggatttgggagtaattttttttggttgtggtttatgtgttttttttgtgtgttgttggggttagtttgtatgtaattttttgaggattttatgtgtgtatttttaaggggtgtggttttttgtttttgtatgaatgggaagagtttttatttgttgtatttttggaaagagtttgtgaaggattggtgttaatttttttttaattgtttagaaaaattttattgtgaaggttttgagtttaagtttttttttgtgggatttttttttttttttttttggagatggagttttgttttattgtttaggatggagtgtagtggtgtaattttggtttattgtaagttttgttttttgggtttatgttatttttttgttttagttttttgagtagttgggattataggtgtttgttattatgtttagttaagtttttgtatttgtagtagagatagggttttattgtgttggttaggttggttttgaatttttgattttaattgatttgtttgttttggttttttaaagtgttgggattataggtgtgagttattgtgtttggttttttttaatgttttatatagatggggttttgttatgttgtttaggttggttttaaatttttggatttagatttgtttattttggttttttgaagtgttgggattataggtgtgagttattatatttggtttggttattgggaggtttttaagggattaatttggtttttttatttgttatagatgtattgagatttttttttggagtgtattttggaagtgtgtatagttgtgtgtttgttttttttgagttatttggtgtgttgttgtgtagttgtttgtggtgtttgtttagtgaagtgtttttgtttttttatgattttggtttttgagttttttttttttttttttggttagtttagttaaggttgtttaagtgtgttgattttttttgagtagtttttggtggatgtttttttttttggttgtagtattggaaagtggtggttttgggtatggtgttgaggtttaggttttatttttagtatttttgggtttttagttttagtttattttgttttgggatatttggaagagaaagaggatggttaggtagatgggatagataattatgttggatattaggttaatagtgattgtgttgatgtttagtgggtttagtttggatatatgttttgtgttgtgtggaggagaggaggttatataggtgaggttgaggggtaggaagggttgggtaggaagaggttgttttgatttttatggtatttatttgtaggtagagttattaatagttttgtattatatggtgttggtgtttaggaagaggtagatgaggagaatgtagtaggtggttttttggatgtgagtgaaatagttatgaggtggttggttttatatggagagttagatgtgtttgttaaagaagttatgttgtagtttagttattagtaggtgttggaagtgtaatagggttgtgtgatttagaaggtagggagggttgtattgtaggaggttatggggtaggattattttgtttaattttttatggagtgggaatatggaatgaggttttatttgtagttagtatttttttttttattaggtttttgttggtttttgtttttattgaaagttagttattgattaggaagaaggtgttgtgtgttgtttgtaggtttttgatgatgatgtgttgtaggaattaggtagggttgagttttgtagaggtgtgggagggaggttaggtttgtagggtgttttaatgtgggggtagaggggtagagtttggtagggtttgtatagatttttgttgttgtgttatatttggattttttatatgttatttaggttgtgtggggtggtgatttggaagatgtttagattgttgtggtggaaggttttgttgttgtttaggtgttggtggttgttttggttgtttattttatatagtatgatgtttatgtgggttgtggtatttggagggtaagagggaggggtgggaggtttggtttgttgtttaatatgtgtggtattttaggtaagttattttagttttggtttttgtgtatttaaggagttatataggtagttttggttttgtatggttttgttatatatgaggagttgtggttattgtaatttgtttaataaatagtaggattttaaggatatgattaagttatatggaaagaattgtaatttgtgatatgtaaatatggttgtatatgttttagtttatattataattagtgatttgtgttgtatatttgtttatgttttagttatgttataattagtgatttgtattatatatttgttttttagtttatgtatagattgtgaagtgtgaagttgtgttatttttttttttagtgatagatttaggtgatagtattttttttttttttttttttgagatggagttttgttgtgttatttaggttggagtgtagtggtgtaattttagtttattgtaagttttgttttttgggtttatgttatttttttgttttagttttttgaggagttgggattataggtgtttgttattatgttgggttaatttttttgtattttttagtagagatagggttttattgttagttaggatggttttggttttttgattttgtgatttgtttgttttggttttttaaagtgtttggattataggtgtgagttattatgtttggttgatagtttttaaaagtaggtaattaaaagaattgggaaatgaagatgaaagtaatatggaaataaaaaatgggaatatagttaggtgtggtggtttatatttgttattttagtattttggtaggttgaggtaggtggattatttgaggttaggagtttgtttggttgatatggtgaaaaattaattgggtgtggtggtgtgtatttgtatttttagttatttaggagaattgtttaaggggaattgtttaaatttaggagttggaagttgttgtgagttaagattatgttattgtattttagtttgggtaatagagtgagattttgtttttaaaaaaagaaaaatgaaaataaaaagggaatgttagaagggtaattttaataaaggaaaatggaggtattgaagaaatagttatggggagggtgttggtatttttgtttgagagatgagttatgtagttaggattgtgggtggatgtatggttttttatagtggtagtgatgtttatgttatttgtggggttatgttattgtgtagaatgtgggttgtttattttgattgattggtatttatttttagttaggagttgttttagtttttagggatagtgagtgtttatgaggttatttttaggatgaatatatgagttttttatatagtattgtaaaaattgttttgttttgatgtttgtgatgagatttatttttagagggtgtaattagtatagttagtgagagtaggggaggttttgttattttgttgtgttttttatttgagttttggttttagtttgttttgatgaggattttgtatttgaagtggttttgttgtttatagaaggggatggtgtagttttggttggtatttaattggtttagtttgtgtaggatggtggttatgattatgtaggttattaggtatatagtatatgttagtatgatgatgtagtttatatttgttgttggtttttgtgaagatatagttgttgggtttaggaggttatgtgtaagttgtgtttttttaggatagagttgagtttatttaggttttttttgattttgtagaggtttttaggagtatagggttatttataggaaatataaagtgtatatggtttgggggtatgaagaggttggtgttgaaggtggtgaggtggtgggtgaggtagatggtttggtggggtgaggttttttttaggggtagtagtttttttgtttgttatattatattttttttgttgaagtattggtatagggatgtgtataagtttatggatatttttagtgttgattagtggaagtggttggagaggtttagatggtaattttttattgggtttttggttttgggaagggaaggggtagtggatgtgagtttaggttttgttaggttggatgttggagttttagagtttatatttggtttagtttttttgttgtttgttgtttttatggggtttgtaatttgggtaatgttgatttatgatgttttgttttgttttgttaggttggtttgtagagtttattttggggaaatgaagaaggtgtagggttggtggttggtattttggagggattttgggtggatttttttgttagttgagtagttgtgtttattgggttggggttttgagtgtaggtagattgttaggtagggtttgggttttttagataggtagtggtttggggtagaatgtgtaggttatatgtttgttgggaagtttaattatttgggggatatttatgatggtttttttgagtttattttttgttatgggtttgaaaggttataggagtttttgtattagagttggtatttgtttttttgtggtttttagtttttttttggttaggtttttaatagtttatgaaatagtaaattttattagagatatttatggaagttttatgagaaatgttttttttttaagaataaggttagggggttgtgtgtgttttatttgttgtatatattgtttagtagtgtatagttgagttgtagatgtagtatggttatagggttgttgttgtttagggtgattatagtattgatggaggtttggggttggattataatggagttggtggagttgtggtggttttgggtagtttagtttgagttgttgggtatttttatggtgatggtgtgttttgaggttagttgtttgatggggatttgggtgttggtttgtgtttggaatgttattgaggttattttggtggagatggtgtagttgttgatatagttaaagagaaagggattggagtttattagaaagatgagttgtattatgttattgaggttggtgggggttttgttgaaagtttaggggatggagaggtggtagttaggttttggggtgttgttatagtatagtaggttttgtgggtttgagtgtttgttttgggttatgatttttttgtttgttagtgttatgggttttttgttgagtatgtgggagtgtgtgaggatgtgtatgagggtagaggttaggttgtaggtttgggatgttattatttgtaatggtgatttggtttttagttttgagtgttgtggtgtttgtatgtttgagttggttaggtggatgaggttttttgtagataggtgtgaggttagtgtagagatagggaggtagagggagggtgggggtaggtaaaaagggggagttggagggtgggggttgggagaaagggggaatttgagggggtagagagtgaggtgtaggtagaaggaagagggaagttggagagagagtggtggagggggagggggaaggggatggggatgaggatgaagatgagggggatgatggggagagggaggaaaaaggaaggaaaagggtagagaaaagagaaaggggagaagaagaggagtagggtgaaagggaggggaaggggataagggggataagggaggggaagggggataagggaggggaaggaggataagggggataagaaagatgaggggaatggataaaaggatggggaggattgggggggaaatggagaaaaggggagagagatggagaaaagggatggtaatagggaagggggagggggaggagaatgggaattgggggagggggataaggatgggaattgggggagggggatgaggatgggaattgggggagtgggatgaggatgggaattgggggagtgggatgaggatgggaattgggggagggggatgaggatgggaattggggggaggggagggggatgaagatgggatggggtaaaggtgaggtggttgtggggaggagggaggtagaggaaagggtggtatggggtggatgggttatgtggggtgggtgggtggtgtggggtatgggttgtggtatttgtgatgttgaggatgttgtttttgatggtggtgggtgttatggtgtttgtggtggtttttgtttgtaggatgtgtattatggtttttagtttgtgtagtgtttgttttaggtatgagtggtatatgagttttttgttgggtttttgtgtggagttagtagtgtttagttttgtttttggttttattttttgtatatgtttttttttttatatgggtttttatttggtttttatttttagttttgtagttggagagtttatttgattggatttttatagtttttttattaagtattttttgtggttttgtatgatttagggtttttatttggggaatatgtgatgtagtttattgattatataaggtatttttttatatgagagaaggaggagggtagaagggagagaggagagggaagtggagaaaaggggggagaggagagggaaggagagagaagggggagaggagaggggaggggagagaaggggggagaggagggagggggaggaggggaggaaggaggaggggaggggtgaggggatggaggggttgggggaggagtggaggggtttagtgggatgaggtgaggggaaggtttaggggaggggaggaggggaagggttaggggaggggaggggttgggggaggaggtaggggttaggggaggggggagggattaggggagggaagggggaggggaggggttaggggagggaaggggaggggaggggttaggggagggaagggggaggggaggggagagtggagggtatagagtagtatttttttagtttttttttatatttgggtttttttttatattttgggttttttgagaggtattttgtgtttatataggatagtagaatggttgaggttattgaagtaggttagagattgaggaatgttatggtaggaaggagtttaggttggaggtttagttttttggttaagttgtttgtttgttttggggggttgaatttagtattttggtaggtatgtggggtggggagagtatgtggggttattttattatgtattgggttagtgtagtagtgatttgttggatgttatttatagtgtggatttttagggatattagagtttttgtgatgtttttgtgtatttgggtttggtgttgttgtttgtgtttgggttttgttgttatgtttagggtttgtttgtattggggtaggtagggggtatagtaagttgttagtagggtaggaggttggtaggaggttagtagatgtttatgatttttggggtgtagttatgtgttagatgttgtgtgatgtgggtattgatttgtaatattgagttgtttttttatgggtaaaatagggtaagtatatgggtttttttgggtgggggttgtattgtggaaagtagatgttggagagggtttggtgggtgtggttgttgggagtggaatgttggggtgttgttttagggttattgggatttatttttggggtttgggatgagttttttgtaaagttttaggtaggggaataggttttggtttttagtatgtatgtagtagatgtgaggtttttttttaggttgtatttattttgtttagtatagtgattagggttagtgagtatttgatgatgtgttggggattggtttgttgtagtagttttgggagtatattagtggtgagtttgtgtagttagattgtgagttttattgtgttgttgttgggttttgggagggtgatggttagagatttatgagtagaggggggtggtgagtaggtggtagttttgggggtgtttttttatggtttggtttatttgttgagggtgattatagtggtttttagttggttttgtattattatggttaggtttattttgaagtgtggtttgaaatttgggggtagtatggttttgtagttggagaggttgtttttgtagatatagaattttttgtagtggttttggtgatagtgttgtagtagtagggtgtatattagtggggtgttagtattttttgtgttatgttagtttgagggatggtttttatggtattatgggagggttttgtgattttatagagttgggggattttgttgttttttttatgtaggtttgtatttatttatgtatttgaagtgtattttggtggtgagagtgtgtatagtgtttagtgggaagaggtggtaagagttttttagtggtgggtggttgggggatagggggatggaggtgtagtttttttttttgttagagtggtttagtattgttagtgtgaaggtgtattttttgttgttttgtagtatgttttgttgtagtattagttatatgtttgtgttgtttgtggatgtggtggttttatttagtattagtgttttgttgttgaatgtatgtgtagtttattgttgtaggtagaagggatggtgagggggtgtaattttttgttttgttagttttatttttgtttgtaggttttgtttttttggttatgggatttatttttaatttgtttatattttgtttaatatttattttttgtttggagttgttgttgtaattgaggtagtggttttttaggtatatgtaggagttgtggtttattttgtatatggtttgtgttttgtaggatatatattttaaggatataatgggtatttggttattgtggattagtatttggtgtgggagtggggttatttttaatataggtttatttggtttgttggaaggtttgggggatttgtggaggatgttgtttttaaattttaggttttttaggggtttggttattgttggtgagtttatttttttttaggatatttatttggtttgttattttttaatttgggtggtggaagggtatatatagggtagaggatattggggtgtgtgttttggtgtattggagttagttggattttggtaggaggtaggtaatgtttattgagggtttttggggggatgtgtgtgggaatagatgtatgtgtgggtgtgaggattgtagttgttatgtaggtttgatttatagatttttgtagtttttagttagggtttgggttaggaggttgagttgggatggaatttgtttttatattttttttttagatgatttttttgggtagatttttaattaggttagttgaggaaagtagggattggggaatagatatttattttggggtattagtaggttttagttagggaggtgtatatgtttatagagggtagggaggtgtatatgtttataggtatttgttgtgtttggtttttgaaggtattagatgttagtaaggttaggatgtatttatttgtggggataggtttaagtggggtagttgtggtatttttatttgttttttatttgtttggtagaagttttttgtttgaggagtttggggtgaatggttgtatttgtggtttagttttaagggttttaggtttttaagttatgtgtgggatggagtataggtgtagtagtattgagggttgtttggtgaggatggtattgtttttaagtgtagttgtatttggggtagtagagtagtaagagttaggttgtggtggggggtagtttagggggtttagtttttttgtttattttttttatgtttggttttttttttattttagtaggggtttaagttattagtttaggtgaggttatagtgagggttgttggggaggaagtggggtagtttgattgggggattgggggggttttgtgtttagagtttgaaaggtagtggtttttttatttttttattttttatttggggtagtgtaggtgtgggtgatattgtgttttattagtatttgggttattgaggggtttggaattgggaaggatttgttgtatggaggttggaattggtggagggtttgttttttatttttaaaggtttatttgttggggtggtgggaggtagtgagtgaattgggataggggtgtgtagtggtggggtataggtgtgtggtggtggggtagggggtgtttgggatttagttgaggttttattttgtagttatgttttgggtttttatttagggtttatttggttgtgttgaggttttttttggtttttgtgtagttttagggtttttgtgtatttagtattttttaatagatagggaaattgaggtttagaaaagtaattttttgatgtggggttttttggttgaggttggagttgggataagagtttggtgtttggataagagtttggtgtttattttaaattggtttttgagttatttataggaaggttatttttatggttgagtttattagtatgtttgttgttagtgttagtgtggtattgggggatagtatggttggtattgtagagatttgtaggttttgtattttgtttatttgttttatggtgatgttgtagtttatggtgatgttgtttatgtggttggaggttgttagttgtagggataggtattagtgggtttaggtggtaggtgagaggtttgttttgtttggtgtttttttttttatttattatagttatggtagtgtttttgggtagtatgaagtagagtagaaggtagaggtgaaggtggagtttgtttttgttttgttttatttttttttttttttatttttgtttatttattgagagtttgaagattgttgtgttttgataaatgatattgaagattatgttttggaaggttagggattgtttgttgttgatggtttattggaagattatgtttgagttggtttttattatggggttgtatttttgtggggggattggtgttagtttgggttttgtggaggattttgtttttagtttgttgttttttggatatattttttgttgggttggagagttttatgtggggtatagaggagaggaggtgtttggggttttgtatgttatgagagttaagtttgggttgggatattgattgtttggttttttagttagttatgtagtattattaatgttttaatttttttgtgttttagtttttttatttgtaaagtaaatttagtattagttataaagagtttatttttttttgagtttttttagatttttttggggtttttgttttagttttttagttagagagtttggagtagtgaggggaggtatatgggttttatagggatagtatttatattggtttatagaatttaggataggttgtataggttatgttatttttgatggttttttttaaggtttttggtgaaggggtaggtatttgtaagatggaatagttttgttttttatgtatttagtatggtggtattgtgggtagtttgtagttttttattaggggtttggattttattttaaaagttatttgttttagttaggtgagaatatagtagagggtgtgagagatttatggggatttgtgtgaggttagggagtggagttttaaatttattttgtgaaatgagatggtggaatgagttagtggagttgttgttagagttgtgattttttaggaatttaaagtttattaggtagtttgaggagttagttagtaggatttgtttggggttgatgtttttagtaattgggttgttgtttttattgggaagttaggttttaagttttgtgtgagtattttgtttgtaggtatttgtttgggggttggtggtggagttttggttatatttattattgggattttttgtagtatatgggttttggggttgggtgtggtgtggaggttatagatgggtttttttgttgttatttgtaggttgaggttggtttggttggtgttgttttttattataatgtttattatgtgtttttttttattgagttatggtagtgttattattgagaatagggtattattggttttttaggggtagttgggtatgaaggtggttattagggtagggtaggtatttttaaagtgggtgttgatattgtttttaggttagtgagttgtggttgtggtgttggtattagagtttatttggagtattgaggttgagttgttggtgggtatgtagaggtggttgttgtggggggtagggtagatgatttgtagtttagttattggggagattatgttaaagttgtaggataggttgtgtttggatatgttattgtttatttttgtttggattttatagtgtttaggtagttgtagtttagggttgggttttaggtttagtagtatggtgagttgttttgtggttgtaagtagttgtagggtataggtagggtaggtttaagtgttttttagttgggttggtaagtggggtagttatgatgaggtgttggtggagaggtatggggtttggggattagggtggttgggagttggtgagtagtgtaggagggtgttagggttagtgttgtgttgtaagttaatgaggttattagggagtatgaggatattttggttgtggagggtgatttgtggagagggaggtagggttgtattatgtttttatggttatggtttgtggatttttgtatgatggatgagggtggatatgtagggttttttgttttgttagttatattttagggagtttttttatagtgtttgtgataaggataggtaggatagttgtagatagggggatatatggggagaggatataggttaagatttggtagataggaaggagtggttgtgttgggagagaggaagaggaggtatagtttgtgttaagggtttaggtgagagttttttttattgggagaggggtaagggtattgtagaggttggaggttggaggttggaggttggaggttagaggtggtaaggatgtgggaggggtttgtaggttgggtgtgtttgttgtgtagatttagattttgggtagtagataggaaggtggtttgaggagatgtagggaatagatttaggttagggttatatattgagtattgtgtggggggttttgtgggaatggagaagaggaattttttttatagtgtatagggggttttgagtagttttggttttgatgtgtagttattggtgtaggtttgggggtggtaggaggtgtttagtggtaagtagatgttggttttagggtattagtgtttttttggtatgtatgtggggattagttgggttttgttgtttggggatttgtttttaggtttgttgttgttttttggggtttttgtgaggaggggagggtgttggggtttttatttgtttatgggttattgttagagatgtttaattgtttgtattagtgagtttggttttgttgtgaggataggtttttttgtttgggtagtatttttagtttagtgttgtgtttttgtttttggttagttgattgatttaggttggtttttaggtaggttttatttgatttatttttaggatatttggaatgagttggtgtttttggaatttttgttttgtttatttaagattgggaattattttgatggttataggattagtagatgtgagagtttagagaggttattttgagttttgtggtgtttattattttagagttttatttgttgtgttgaggagttggtatatttgtagttgtagttgggtgggttgttggagtttttgggttttaaatttggttgtggtgaggaaggttttatggtttagatgtaggtttgggaatattatgatttggtgggtagggggttgttttagttttatagattttattttagtttgaagtttagattttttttatttgaattttgtaggaagaggggagggaaggagagtgagttattggatttttataggtttggtttttgttgtttgagaggaagattttgatggaaattgtttatggggggtaggatttttgatttgttttttaggaataatttatttatatttagagaaaaggtttgggggtaatgtgagtaaatgtttttttttttgtattttggatttttttaattatttttattgggtataagtaatattaaggtttttaagttttttggtgagatttatagtgggtagggtaggtgaggtttttaggggtaggtaggagggtaggttatagaatgtggggggttgattatttttatgggtttgtgtggggttgagaggttgttttgttgtgttagaggtattaggggtttttataggtttttattgggtgtttttatgaggaggtttttggtattttgtattgggtttggggtggtaagtgtatagtgaggtgttgggttagggtttaggatattaggatgaatagattggggattgagttgtttgagaatttttttattagttttttttttttagtttaggttttattgtgggtgtttggtaggtttttaattatagttagtgttttaggtttttgtttggttttttgtatatttttaggttgtagtttgtagatgtagttgtgtggtgttgagtataggttggtgttatattatttggtgggtttgagttggatgtagtgtttggttgtggttgggtgtggttttttgggtagttagttttggtagttttttaggttgaaggttttgttttgtggtgttgggtttatttttattttttgtatagttgagaagttgatttatatgtttaggtttttgggggtgggtgtgggatggtagggggtttagggtatttttttatttttttatttttatagtagtttgttgggagttttgttattgtttttttttttagatggggaaattgaggtttagagtttggagagtagggtttattagtttaggtttatagtagtatttatttatggggtttgtgggtattggtagggatttttgtgtaggttattttttgtatggtgtgtttaggagtgtttggaggttgtttttagtttgtgtttatttttgtatttgtagagttgataggaatggttttattggttggtgttatttgtttattagggttggtttagtttttatttttttttttttgagattttttagttgtaggttttgttttattgttttagagattttttaatttatggttttttggggggtggggtaggtatttggtgatttgggagattaggaagtgttgtatggtgggattgtttattattgttagggtggttttggtttaggtttgatattgtttttgtgtttgtagttaggttgttttttttattattaggtggtagtagtgtttattgttagagaagatttttgtgtttgaggggtagagtgggtgtattgttggagattagtgggaatgagggtgttaatggttagtgtgggtttaagatgggggtattaggttttgttttatttggatggttttggggaggaaggggagtgggtagtagatatttattttgggttggttttttgtttagggttatgatgttgtaggtggtttttaggtttgaattattgtggttttggatgttgaggttgaggtttttgttattttgtattgaggatgggtatatgagttttagggtggtaggtgttgtttttatttgtatgtttgtttttagtagggttgagttggtttttagggttagtatggttgttatgtgatagtgtttaggtagtatatagtgatgtgaggtagttggtttagtggtatttattttgggggagttgtttttgaagttttagtgtgtggtagtgatagggagtggggtagtgatgtggaaggttgttagttggttggaggttaggggtttgtggggttttattagggtggtttttggggaggtagggaagatgtgttggaggagggtggggtttttataggtgggggtaggaggtggtggggggttggagtag

SEQ ID NO: 280 - DNA, 17265 bp, Artificial Sequence
  chemically treated genomic DNA (Homo sapiens)
ttgttttggttttttgttgttttttgtttttatttgtaggggttttatttttttttagtatgttttttttgtttttttaggggttattttggtggggttttatggatttttggtttttggttagttagtagttttttatattgttgttttgttttttgttattgttatatgttgggattttggagatggtttttttgaggtggatgttgttgggttggttgttttgtattgttatgtgttgtttgggtgttattatgtgatggttgtgttggttttggggattggtttagttttgttggggatagatgtgtaggtggaagtggtatttgttgttttggagtttgtgtgtttgtttttggtgtagagtgatgagagttttgattttagtatttagaattgtggtggtttaggtttggaggttgtttatagtattgtggttttgggtgaggagttggtttgaggtgagtgtttgttgtttatttttttttttttttagggttatttagatggggtagagtttggtatttttgttttgggtttatattgattgttgatatttttgtttttattggtttttagtggtgtatttgttttgttttttggatatggagattttttttggtaatgggtattgttattgtttggtggtggagaaggtggtttggttgtaggtgtaggagtagtgttgggtttgggttggggttattttggtaatggtggatagttttgttgtgtagtgttttttggttttttgggttattaggtgtttgttttattttttgaggggttataggttgggagatttttgaagtagtggggtagagtttgtggttggggagttttaggaggagggaggtgggagttgggttggttttggtgagtaggtggtgttggttggtggggttgtttttgttagttttgtagatgtagaggtggatgtgagttgggggtagtttttggatatttttgggtatgttatatgggaggtggtttgtatggggatttttgttggtgtttataggttttgtgggtgggtgttgttgtgagtttgggttggtgggttttgttttttgggttttgagttttagtttttttatttggaaagggggatagtgatggggtttttagtgggttgttgtgagggtgggaggatggaggagtgttttgagttttttgttattttatatttgtttttaggagtttagatatgtggattggttttttgattgtgtagggggtggaggtgggtttagtgttgtagggtgaggtttttagtttggagagttgttagaattggttgtttggggagttatatttagttatagttgagtattgtgtttggtttgggtttattgggtggtgtaatattgatttgtgtttagtgttgtatagttatgtttgtgagttgtggtttggaggtgtgtgaggggttaggtaggggtttgagatgttggttgtggttaggggtttgttgagtgtttgtggtggagtttgggttgaggaggaggggttggtgggggggtttttgggtggtttggtttttagtttgtttgttttggtgttttgggttttggtttggtgttttattgtgtatttgttattttaggtttagtgtaggatgttgagaatttttttgtgggagtgtttagtggggatttgtagggatttttgatgtttttggtatggtaggatggttttttagttttgtatgagtttgtggaggtagttggttttttatgttttataatttgtttttttgtttgtttttggaggttttgtttgttttgtttattgtgggttttgttaaaaaatttgggggttttaatgttgtttgtgtttagtgaagatggttgggaaaatttagagtgtagagaggaaagtgtttatttatattatttttaggttttttttttgagtgtgggtgagttatttttgaaaggtaggttaggggttttgttttttatggatagtttttattggagttttttttttgagtgataggagttaggtttgtgggggtttgatggtttgtttttttttttttttttttttttgtgaagtttgggtggggggagtttgggttttaggttgggatggggtttgtggagttgaggtggttttttgtttattaggttatggtatttttgggtttgtgtttgagttgtgaagttttttttattatggttgaatttgggatttaggagttttggtggtttgtttagttgtggttgtaggtgtattggttttttagtatagtaggtgggattttggggtggtgggtgttgtaggatttggggtggtttttttgagtttttatgtttgttggttttgtggttattagagtggtttttagttttaggtggatagagtaggggttttagagatattagtttattttaggtgttttgggggtggattgggtggggtttgtttggggattggtttgggttagttagttggttggagatagggatgtagtattgggttgggagtgttgtttgggtggggagatttgtttttatagtaaggttaggtttgttggtgtaggtagttgggtatttttgatggtggtttgtgggtgaatgagggttttaatatttttttttttttgtagggattttggagaatggtagtgagtttgagagtaggtttttggataataggatttagttggtttttgtgtgtatgttagggggatgttggtgttttggagttaatatttgtttgttgttggatgttttttgttatttttaggtttgtgttaatggttgtatgttagggttagggttatttggggttttttatgtgttatggagagagttttttttttttgtttttgtggggttttttgtgtagtatttggtgtgtggttttgatttgggtttgttttttgtatttttttaggttatttttttgtttgttgtttagggtttgggtttgtgtagtaggtatatttagtttgtaggttttttttatgtttttgttatttttgatttttgatttttgatttttaatttttgatttttgtagtgtttttgttttttttttagtgggagaagtttttgtttgggtttttggtatgagttgtgtttttttttttttttttttagtatagttgtttttttttgtttgttaggttttggtttgtgttttttttttgtgtgtttttttgtttgtaattgttttgtttgtttttgttatgagtattgtggggaggttttttgaggtgtggttgatgaagtggggagttttgtgtgtttatttttatttgttgtgtaggggtttatgggttatgattgtgaggatgtgatgtagttttgtttttttttttataggttattttttatagttaggatgtttttatgttttttggtgattttgttggtttgtagtatgatgttggttttggtgtttttttgtattgtttgttggtttttggttattttggtttttaggttttgtatttttttgttaatgttttgttatggttgttttatttgttagtttagttggagggtatttgggtttgttttgtttgtgttttgtggttgtttgtagttatggaatagtttattgtgttgttgggtttgaggtttaattttgggttgtggttgtttgggtgttatgaggtttgggtagaggtgggtaatggtgtgtttaggtataatttgttttgtagttttgatgtggtttttttagtggttgggttgtgggttatttattttgttttttgtgatggttgtttttatgtgtttattaatggtttagttttggtgttttaggtggattttggtgttagtgttatggttatggtttgttggtttgggggtagtgttagtgtttgttttgagaatgtttgttttgttttggtggttatttttgtgtttggttgtttttgggagattaatgatattttgtttttagtggtagtattgttgtggtttggtgagggggagtatgtgatggatgttgtggtggaaaatagtgttagttgggttaattttagtttgtgggtgatggtggaggagtttatttgtggtttttgtgttatgtttagttttgaggtttgtgtattgtagggagttttagtggtgagtatggttgaggttttattattagtttttaggtaggtgtttgtagatagggtgtttatatagggtttgaggtttggttttttagtgagggtagtagtttagttattggggatgttggttttgggtaggttttgttggttggttttttaggttatttggtgggttttaaatttttggaaagttatggttttgatagtggttttgttaatttattttattgttttattttatgaaatgaatttaaaattttgttttttgattttatatgagtttttgtgagttttttatgttttttgttgtgtttttgtttggttaaagtaagtggtttttgaggtggagtttgaatttttgatgggaaattgtgggttgtttgtagtgttattatgttgggtatatgggggatagggttgttttattttgtgggtatttgtttttttattaggggttttgggaggggttattagaaatggtgtgatttgtgtagtttgttttgggttttgtaagttagtgtaggtgttgtttttgtgaggtttgtgtgtttttttttattgttttgagttttttggttgaggagttggggtaggagttttgggagggtttgagaagatttagagagaggtggattttttgtagttggtattaggtttgttttatagatggggaaattgaggtatagagaggttgaggtattagtagtattatatggttggttggagagttggatagttagtgttttagtttgggtttggtttttatggtatgtagagttttgggtatttttttttttttgtgttttgtgtgggattttttagtttgatgggaggtgtgtttaggaggtgataggttaagggtagagttttttatagagtttaggttgatattagtttttttgtagaggtatagttttgtggtggaggttggtttggatatggttttttggtggattattaatgataagtagtttttgattttttagaatgtggtttttaatgttatttattagagtgtggtggtttttaagtttttagtaggtgggtgggagtggggaggggaggggatggggtggggtgggggtgggttttatttttatttttgttttttgttttgttttatgttgtttgaggatgttgttatggttgtggtgagtggagggagggatgttaagtagggtaggttttttatttgttatttgggtttattgatgtttgtttttgtagttgatggtttttaattatgtgagtaatgttattgtgaattataatattattgtggagtggatgaataggatgtagggtttgtgggtttttatagtgttagttgtgttgttttttaatgttatgttggtattgatggtgggtgtgttggtggatttggttgtggaggtggtttttttgtgagtgatttaggggttggtttggggtgggtattaggtttttgtttgggtattaggtttttgttttggttttagttttagttgagggattttatattagggggttgtttttttgagttttggtttttttgtttgttgggaggtattgggtgtataggagttttgaggttgtatgggagttgggagaggttttagtatagttgggtgggttttgaatggaggtttggggtgtgattgtagagtggagttttggttgggttttaagtattttttgttttgttattgtgtatttgtgttttgttattgtgtatttttgttttggtttatttattgttttttattgttttggtaggtggatttttggggatggggagtaggttttttattagttttagtttttgtataatgagttttttttggttttagattttttggtggtttaggtgttggtggagtataatgttatttatatttatgttgttttaggtgagggatgagggggtgagggggttattgttttttaggttttgagtatggggtttttttagttttttagttaagttgttttgttttttttttaatagtttttattgtgattttatttgggttgatggtttaggtttttattggggtgagggaggggttaggtgtgggaggagtggatagggaagttgggttttttgaattgttttttattgtggtttggtttttgttgttttgttgttttgagtgtagttgtatttggaggtggtgttgtttttattaggtagtttttagtgttgttgtatttgtgttttgttttgtatgtggtttgggagtttgggatttttaaggttgggttgtaggtgtagttgtttattttgggttttttaggtggggggtttttgttgagtgggtggggagtaggtgggggtgttgtggttgttttatttgggtttgtttttataggtgagtatgttttgattttgttggtatttaatgtttttgagaattggatgtagtaggtgtttgtgagtgtgtgtgtttttttgttttttgtgagtgtgtgtgtttttttgattggggtttgttggtattttagagtgggtgtttgttttttagtttttgttttttttagttggtttgattgggggtttgtttagaggggttgtttgaggggagggtgtgggagtaggttttattttggtttagttttttgatttaggttttggttaagggttgtaggagtttgtgagttaggtttatgtggtaattgtggtttttatatttatatatatgtttgtttttatatgtatttttttaggggtttttagtgagtattgtttgttttttgttagggtttagttggttttagtatattagaatgtatattttagtgttttttgttttgtgtatgtttttttgttgtttaggttggaaggtggtaaattggatgagtattttgggagggggtgagtttattggtagtggttaggtttttgggaaatttggagtttgggagtagtattttttatgggttttttagattttttagtaggttaaatagatttgtgttggaggtaattttatttttatgttaggtgttgatttgtagtggttgggtgtttattgtgtttttggagtgtgtgttttgtaaggtataggttgtgtatgaagtgagttgtagtttttatgtgtatttggagggttgttgttttaattgtagtagtggttttaagtgaggggtgagtgttgagtggggtgtgggtgggttggggatgggttttatggttgaggggatggggtttgtaggtagaagtggggttgatagggtagagggttgtgtttttttattattttttttgtttgtagtggtgggttgtatgtatgtttagtaataagatgttggtgttggatgagattattatatttatgggtagtgtaggtatgtgattggtgttgtggtggggtgtgttgtgggatggtgagggatatatttttatgttgatggtgttgggttgttttggtaaggaggagggttgtgtttttatttttttgttttttaattgtttgttgttggggggtttttgttgtttttttttattgggtgttgtgtatgtttttattattaaggtgtattttgaatgtatgggtgagtgtaggtttgtgtagggggagtagtgggattttttgattttgtgaggttatggagtttttttgtgatgttgtggggattgttttttaggttggtatgatgtggaggatgttggtgttttgttggtgtatgttttgttgttgtagtgttgttgttagggttattgtgaggagttttgtgtttataagggtagtttttttggttatggagttgtgttgtttttgggttttaggttatattttgaggtgggtttggttgtggtggtgtaggattagttgggagttgttgtggttgtttttaataggtgagttaggttgtgggagggtgtttttgagattgttatttatttattatttttttttgtttgtaggtttttggttattatttttttagagtttaatggtagtgtaatggggtttatagtttggttgtatgggtttattgttagtgtgtttttggggttgttgtggtaggttgatttttagtatgttattgagtatttgttggttttggttattgtgttgaatgaggtgagtgtagtttgggaggggattttatatttgttgtatgtgtgttggggattaagatttgtttttttgtttggagttttgtggagggtttattttgggttttagagataaattttagtgattttgaagtagtattttgatgttttgtttttagtagttatatttattgggttttttttggtgtttgttttttataatgtagtttttgtttaggagggtttatgtgtttattttgttttgtttatgaagaaatagtttagtgttgtgggttagtgtttatattatatagtatttagtatgtaattgtattttgggagttgtgggtatttgttggttttttgttggttttttgttttgttgatagtttgttgtgttttttgtttgttttagtatgagtgggttttggatgtggtggtagagtttaagtatgagtggtagtgttgagtttagatatgtaagaatattatggagattttggtgtttttgagggtttatattgtggatgatatttagtagattgttgttgtgttggtttagtgtatggtaggatggttttatatgttttttttgttttgtatgtttgttagggtattgggtttagttttttagggtagatgggtagtttggttgaggagttgagtttttagtttgggtttttttttgttatggtgttttttggtttttgatttgttttagtagttttagttattttgttgttttgtgtgaatgtagggtgttttttgggggatttagggtgtaaagaggggtttagatgtggggagggattaagaagatgttgttttgtgttttttattttttttttttttttttttttttttttttagtttttttttttttttttttttttttaattttttttttttttttttttttttttagtttttttttttttttttagtttttgtttttttttttagtttttttttttttttagtttttttttttttttttttttttagattttttttttattttattttgttgagtttttttattttttttttagtttttttatttttttattttttttttttttttttttttttttttttttttttttttttttttttttttttttttttttttttttttttttttttttttttttttttttttttttttttttttttttttttatttttttttttttttttttttttgttttttttttttttttatgtgaagaggtgttttgtgtggttggtgggttgtattatgtgttttttaggtggaggttttgggttatgtagagttataaaaaatgtttagtgaggaggttgtgggggtttagttaagtgggttttttagttgtagggttgggggtgggagttaggtgaggatttgtgtagagaggagggtgtgtgtaaggagtggggttaggagtggggttggatattgttggttttatataggggtttagtagggagtttgtatgttgtttgtgtttgaagtagatgttgtataagttggaggttatgatgtgtattttgtaggtagagattattgtgggtattgtgatgtttattgttattggagatagtatttttaatattataggtgttgtggtttgtgttttatgttatttgtttgttttatgtggtttgtttgttttatgttgtttttttttttgttttttttttttttataattgttttgtttttgttttattttatttttgttttttttttttttttttaatttttatttttattttttttttttaatttttatttttattttgtttttttaatttttatttttattttgtttttttaatttttatttttattttttttttttaatttttatttttattttttttttttaatttttattttttttttttttttttttttttattattattttttttttttatttttttttttttttttttattttttttttgattttttttgtttttttgtttattttttttattttttttattttttttattttttttttttttttttattttttttttttttttttattttttttatttttttttttttttttttattttgtttttttttttttttttttttttttttttttatttttttttttttttttttttttttttttttattattttttttatttttgtttttatttttatttttttttttttttttttttattattttttttttagttttttttttttttttgtttgtattttgttttttgtttttttaggtttttttttttttttagtttttattttttggttttttttttttgtttgtttttattttttttttgtttttttgtttttgtattgattttatgtttgtttgtaggagattttatttatttggttagtttagatgtgtgggtattgtagtgtttagagttgggagttgagttattattgtggatggtggtgttttaggtttataatttgatttttgtttttatgtgtatttttatgtgtttttgtgtgtttaatgaggagtttgtgatgttggtgggtgaggagattatggtttagggtaagtgtttggatttgtggagtttgttgtgttatggtggtgttttagggtttggttgttatttttttattttttaggtttttagtagggtttttgttaattttagtgatgtggtgtagtttgtttttttggtggattttaatttttttttttttggttatattagtaattatattgtttttattaaggtggttttgatggtgttttagatataggttggtgtttagatttttattgagtggttggttttagagtgtgttattattgtgaaggtgtttaataatttggattgggttgtttggggttattgtagttttgttaattttgttgtggtttagttttaggtttttgttggtgttgtggttattttggatagtagtagttttgtggttgtgttgtatttgtagtttaattatatgttgttggatggtgtgtgtagtgggtggggtatatgtggttttttggttttgtttttggggggaaggtgttttttgtagggtttttatgggtgtttttggtgaaatttgttgttttatgggttgttgggggtttggttggagaggagttgggggttatggagaagtaggtgttagttttggtgtagaggtttttatggttttttaggtttgtggtagagggtgggtttaggagggttattgtgggtgttttttgggtggttgagttttttggtaggtgtgtgatttgtgtgttttgttttaggttgttatttgtttgaggaatttgagttttatttggtagtttatttgtatttggagttttggtttaatgagtgtaattgtttggttagtaggaggatttgtttagagtttttttagggtgttgattattggttttatattttttttatttttttggggtgagttttgtgggttggtttggtagggtagggtagggtattatgggttagtattgtttgggttatgggttttgtggggatggtaggtagtgaggggattggattgggtatgggttttgggattttgatatttaatttggtggagtttgggtttatgtttattgttttttttttttttaggattagagatttagtggggagttattgtttgaatttttttagttatttttgttggttggtgttggaggtgtttgtgggtttgtatatgtttttgtgttagtattttagtgaggaggatgtggtgtggtggatagaggggttgttgtttttggaggagattttgttttgttaggttgtttgttttatttgttattttattgtttttggtgttagtttttttatgtttttaagttatgtatgttttgtgttttttgtgagtgattttgtgtttttgggagtttttgtagagttgaggagggtttgggtgggtttggttttattttgagaaggtatagtttgtatgtgattttttgggtttggtggttgtgtttttataggagttgatagtggatgtaaattatattgttatgttgatatgtgttgtgtgtttggtgatttatatggttatggttgttattttgtataagttggattagttggatgttagttggggttgtgttatttttttttgtgggtagtggggttgttttaagtatgagatttttgttaagataggttggggttggggtttaggtgaggggtgtggtggggtggtagggttttttttgtttttattggttgtgttggttgtattttttgggagtgagttttgttgtaggtgttagaataaggtagtttttgtagtgttgtgtgaagggtttgtgtgtttattttgggaatgattttgtgagtatttattgtttttgaggattaggatagtttttagttggaagtaggtgttagttagttagggtgggtagtttatgttttgtatagtagtgtggttttataagtgatatgagtattgttattattgtgggagattatgtatttatttgtgattttgattgtatagtttgttttttagatggaggtgttagtattttttttgtggttgtttttttaatatttttatttttttttattggaattgtttttttggtattttttttttgtttttgtttttttttttttggagatggagttttattttgttgtttaggttggagtgtaatggtgtgattttggtttatagtaatttttagtttttgggtttaagtgattttttttaagtgatttttttgagtagttgggagtataggtgtatgttattatatttagttaattttttattatgttagttaggtgaatttttgattttaggtgatttgtttgttttggtttgttagagtgttgggatgataggtgtgagttattatatttggttgtgtttttattttttatttttgtgttgtttttatttttattttttagtttttttgattatttatttttaaaaattgttggttgggtgtggtggtttatatttgtaatttgagtattttgggaggttgaggtaggtaaattatggggttaggagattgagattattttggttaatggtgaaattttgtttttattaaaaaatataaaaaaattagtttggtgtggtggtaggtatttgtagttttagttttttgggagattgaggtaggagaatggtgtgagtttgggaggtggagtttgtagtgagttgagattgtgttattgtattttagtttgggtgatatagtaagattttattttaaaaaaaaaaagaaaaaaaatattgttatttgggtttgttattgggagaggaggtgatatagttttatgttttgtagtttgtgtatgaattgagggatgggtgtgtggtgtgggttattggttgtggtgtgattgaggtgtggataggtgtgtagtgtgggttattggttgtggtgtggattgaggtgtgtgtagttatgtttgtatgttataagttatagttttttttgtgtaatttaattatgtttttgaggttttgttgtttattggataaattgtagtaattgtagttttttgtgtatggtagagttgtgtaaagttgggattgtttgtgtggttttttgagtgtgtggaggttaaagttgagatgatttgtttgggatgttatatgtgttgggtagtagattgagttttttattttttttttttgttttttaggtattatggtttatgtgggtattatgttgtatggggtggatagttggagtggttattggtatttggatggtgatagagttttttattgtaatagtttggatattttttggattgttattttgtatagtttgggtagtgtgtggaagatttgagtgtggtatgataataaaggtttgtgtggattttgttaagttttgtttttttgtttttgtattggggtgttttgtgagtttgattttttttttgtgtttttgtagggtttagttttgtttggtttttgtagtatattattgttagggatttgtagatggtatgtagtattttttttttggttaatgattggtttttggtggagatggaggttaatgggggtttggtggagaaggaggtgttggttgtgagtaaggttttgttttatgtttttattttgtgggaggttgggtagggtggttttgttttgtggttttttgtagtgtggttttttttgttttttaggttatgtagttttgttgtgtttttggtgtttgttggtggttgagttgtagtgtggtttttttgataagtatatttggttttttatatgggattggttattttgtagttgttttatttgtatttagagggttatttgttgtgttttttttatttgtttttttttgggtgttaatgttgtgtggtatggggttgttggtgattttgtttataggtgggtgttgtaggggttgggatagtttttttttgtttagttttttttgttttttagttttatttgtgtggtttttttttttttatatagtatggggtatgtgtttaggttgagtttgttgagtgttgatatagttgttgttggtttggtgtttagtgtggttgtttattttgtttatttggttatttttttttttttttggatgttttggagtaaggtgggttggggttggggatttgggagtattgggaatggagtttgggttttggtattatgtttagggttgttattttttagtgttgtagttagagggaaaggtgtttattaaaggttgtttgggaagggttaatatatttgagtagttttagttagattgattagggagaaagagagaagatttagaagttagaattgtgaaagaatgagggtattttgttaagtagatgttatggataattgtatagtagtatgttagataatttagaagaagtaagtatgtggttgtgtatgtttttgaaatgtattttagaagaaaattttagtatatttatagtaagtgaagaggttgagttagttttttagaaattttttagtggttgggttgggtgtggtggtttatgtttgtaattttaatattttaggaggttgaggtgggtggatttgagtttaggagtttgagattagtttgggtaatatagtaagattttatttatataaaatattaaaaagggttaggtatggtggtttatgtttgtaattttaatattttgggaggttgaggtgggtagattagttgaggttaggagtttgagattagtttggttaatataatgaaattttgtttttattataaatataaaaatttagttgggtatggtggtgggtgtttgtagttttagttatttgagaggttgaggtaggagaatggtatgaatttaggaggtggagtttgtagtgagttgagattgtgttattgtattttattttgggtaatggagtaagattttatttttaaaaaaaagaaaaaaaaaattttataaagaaaagtttgggtttagagtttttatgatagaatttttttaagtagttaaggaagaattaatattaattttttatagattttttttaagaatatagtaggtgggaattttttttatttatatggaaatgggaggttgtattttttaggaatgtatatgtggggtttttaagaggttatatgtaaattaattttagtagtatatagagaaggtgtataagttgtgattaggaggggttgtttttgagtttgtggtaggaattagaggttatatgtggttgtttgtattaaagttaattaaaatggaatgatggttgggtgtggtggtttatatttgtaattttagtattttgggaggtggaggtgggtagattatttgaggttaggagttttaagattagtttggttaatatagtgaaattttgtttttattaaaaatataaaaaattagttgggtattgtggtaggtatttgtaattttagttatttaggaggttgagttaggataattgtttgaatgtgggaggtggaggttgtagtgagttgagattgtgttagtgtatttttgtttgggtgatagagtgagattttattttaaaaaaaaaaaaaaaatgaaatttaaaattttgttttttagttgtattagtttgttgttaagtgtttagtggtatatgttgtgaggggttgttattatggatggtgtagatgttttatatatttagtattttaggatattttgttagatggtattgggttttgttttgtttgttgaggaggtggttttttatttttgttttgagtaggtttgagttgttgtttgttgattattgttgttgttttgtaggtggttgggagtttgagttttatatttgttgggtagtaggtgttggatattgatagttgtttggatttgtttgtgttggatagttttttttttatgtttttaggtttttatgttgaggtgagggttttattgggggttttgggttgggttgggggttttgttgttttggtgtagtttggattttagatattgtgtattttttagtaggtttttgttggataggtgaagagtgatttgtttttggatgattttaagaggtgggttttttagagaaattttgagttttggtgtaggttattgtgtttggagtattgggggtgtgtgggttgtgtgtttttgttgggtgtttgtggttttatgtggttatattatgtgggagtaggtttgtttggaagtttagggtgtttgtgtgtgattggatgggggtgggttgtgtgtgtgatatattttttggtattttgttgatttgtgttatttgtagtttggtgtgttggttttttagtgagggaatgtttagttggttggatttgtttagtgatttgtttattgtgggtagtaatttgtggtataatttttatttattgggtttttttttttataattaatataattgaaatttagggtttttttttttttttttttttttttgagatagagttttattttattttgttatttaggttggagtgtaatggtatgattttggtttattgtaatttttgttttttgggtttaagggattgttttgttttagttttttgagtagttgggattataggtgtgtgttattatgtttggttaatttttgtatttttggtagagatggggttttagtatgttggtgaggttggttttgaatttttaattttgtgatttgtttgt

SEQ ID NO: 281 - DNA, 2204 bp, Artificial Sequence
  chemically treated genomic DNA (Homo sapiens)
agggataaatttatttaaatttttttttaatttgttatttttgggattttaattagaattgggttgtttttttgtggtttttttgatgttttatttttaattagtttatagtttttgggttttgtttttttttttattgtatttttaaaatgtaaggtgtaatgataatagtaatgttttagttatttttgagattttttaaattttggatttgtttttttttttttttttaaagttttttgaattttttttagtggataaatgaagggattgaagttggataaaattataatttaggagattagggatttattttattttgttttttgtgtttggaattagataatttaggatgttgggtttgagaagtttggataaaaaagttaggaaaaattgagttttgttttgatttttagtgttgtggtgggttggtatttgagttggtaatgtgtgtggtaggttatgtaagaaaagggatggaggagttgttttagtgggagttagaaaggatgtggtgtttttggttgtaatttttattttttttatttagtagggtaggaggtatttaatttggaggagaaaggggtgggggaggtgaaatagagattggagagttatgagggttgggttgttgagagtaggagaatatattgtgttatatatttttatttttttatatatgttgtagatataaattattgatggtttttatgtgttgtgtttgtgagtggaggtgtttaaagagggggtagatgagttattttttgagatggaattgggggttttatgtttgttgtttttagtagtataattaatttttgaatatttaaattgtgtatttttggtgtattattattttatttaaggttatgggttttgtttttttttttttttttttttttttttattttttttttattttttttttttttttattattgggttttttttagtagttgtatgtaggggaggagtatggaatgttttttttatagttaattattatttggttgtttttttattggttgagtttttttgtattgtagtaaatgggttatggattttagtaattagagttatgtgttattggtgatataattaatgagggtgtgagatttgtgtaagtagggggaggtatgtgttgggttgtatgtgtttgggagggggggaaggggtggggtttattgagagaggtggaggtgggtagatagatttggagagatggtgaaggagttggaaattgagttagggttgagttggttgataataggtaaggagatttggaggataaagtgagttgttagggagtatttgggagtggatttgggggttgaatgtagattttggtattgggagggtttgtattatgtggtaggtgtgagtttagagagattggtgtagggattttgattttgaaagattgggagagggtaggaggttagtttttatgggggtggtttttgtaggattattaggtgggtttgtgtgtttagattgattgtttgtgggtggtatggttttaggtggagaggtttgttgtggatttaggttggtgaatagttttggtgaataatgggtggaggggaaggtgttttttaagttggtatttattttgaattgagggaagaaaagaatggaggttgtgttagattgagagttgttttgtggtggttagagagggaattttaagtttttaatgggtgggggtgggggtagaaatgtttttttttattgtgtttgagattggtaatattggggagggggagaataagtattattttatgtagtatattttaattttttagtttattttttaatttttaaattttggttttaaatttttttgttttgttttttagttgtaggttttgatttttgggtattttaggagttgttttatagtttttgtttttggatttatggattttttatttagtgtttttttttattttttttattttttttttttgtttttttttatttttttagtgaatagtgattttggttttttttttgatagtgagagggaggataagggggtttatgggtttaggttagatattgttgggtagaggggaggtttatggtttagtttgggttttatttgttgtaggtattgattgaaggtttttggtaattagtatatattattttatttgaaatagtggggtttggttttttttatggtaggatttggggtgaaa

SEQ ID NO: 282 - DNA, 2204 bp, Artificial Sequence
  chemically treated genomic DNA (Homo sapiens)
ttttgttttagattttgttataggagaagttgaattttgttgttttggatgagatggtgtatgttggttattggaaatttttgattgatgtttgtagtggataggatttgggttgggttgtgaattttttttttgtttaatagtgtttggtttgggtttatgggtttttttgtttttttttttattattagaggggaagttaaagttattgtttattggggaggtgggaaaagatgaagagagagagtaggaggaataggaagaaatgttagatggagaatttataggtttagaagtaggggttatagaatagtttttggagtatttaaagattggaatttgtaattgaagagtaaagtgagggagtttgaaattagagtttaaggattaggaaatgaattgggagattggggtgtattgtgtgggataatatttgttttttttttttttaatattattggttttaaatataatagaaaaagatatttttatttttatttttgtttattaagagtttgggattttttttttggttgttgtagagtagtttttggtttgatgtggtttttgtttttttttttttttagtttagagtaaatattgatttgaaagatatttttttttttgtttgttgtttgttagggttatttgttagtttgagtttgtagtaagtttttttatttgaggttatgttatttataagtagttaatttgggtatgtgaatttatttggtgattttatgggaattgtttttatagagattggttttttgtttttttttaattttttaagattaggatttttgtgttggtttttttgggtttgtatttgttatgtgatgtaaatttttttaatattaagatttgtatttagtttttaaatttatttttaaatattttttaatagtttgttttgttttttgaatttttttatttgttgttagttggtttagttttggtttggtttttagtttttttgttgtttttttgggtttatttatttatttttgttttttttagtgggttttgtttttttttttttttttagatatgtgtggtttggtatgtgtttttttttgtttatatagattttgtgtttttattggttgtgttgttggtaatatgtgattttagttattgaagtttatagtttatttgttatagtataaaggggtttagttagtagagaggtagttaggtgatgattggttgtaagggaagtattttgtgttttttttttatatgtggttgttggagaggatttggtgatgagaaaaggaggaggatggaaaaagagtggaaaagaagggaggggaggaaaagggtggagtttgtggttttaaataggatggtgatgtgttagagatgtgtggtttgagtgtttagagattggttgtgttattgaaggtggtggatgtgggatttttggttttgttttgggaagtaatttatttgttttttttttgaatatttttgtttatgagtgtagtatgtggaaattgttagtgatttgtgtttgtaatgtgtgtgagagaatggaggtgtgtgatatggtatatttttttgtttttggtggtttagtttttgtgattttttggtttttgttttattttttttattttttttttttttaagttgggtgttttttgttttgttgggtgaggagggtggggattgtaattgagaatattgtgttttttttggtttttgttggggtggtttttttatttttttttttatataatttattatgtatgttattagtttagatgttagtttgttatgatgttagaggttaaaatgaaatttagttttttttgatttttttatttaggttttttgggtttggtgttttaaattatttgattttaagtatggggaatagaatggggtaggtttttgattttttaggttatggttttgtttagttttagtttttttatttgtttgttggagaagatttgaaagattttgaaggaggggagggaggtaagtttagagtttagagagttttagaagtaattgggatgttattattgttgttgtgttttgtattttgagagtataatggagaggagagtagggtttaaggattgtgagttggttgaagataggatgttggagagattgtaagggggtagtttaattttaattagggttttgaggatagtgaattaaaaaaaaatttaagtgagtttgttttt

SEQ ID NO: 283 - DNA, 13135 bp, Artificial Sequence
  chemically treated genomic DNA (Homo sapiens)
tttgtgtttgtttttgattttattttttaaattagatgtttagtttggtgtaaatgtaggagtggagtttttagggggatgtggattttttttttttatttttattttggtttttgtttttttttttttgtttttattttggtttttgtttttttttttttgtttttattttggtttttgtttttttttttttgtttttattttggtttttgtttttttttttttgtttttattttggtttttgtttttttttttttgtttttattttggtttttgtttttttttttttgtttttattttggtttttgtttttttttttttgtttttattttggtttttgtttttttttttttgtttttattttggtttttgtttttttttttttgtttttattttggtttttgtttttttttttttgtttttattttggtttttgtttttttttttttgtttttattttggtttttgtttttttttttataggaggagtttgggggtttttgtgttataggggtgtggtttagggtattaggtggggtggtgggtattgggtttagagtggttttgggttgtttagtttttttttttttttttaggattagtgatttttttagttttaggatattttttgggttagggtttagggtagagttaatgtttttttagatattttttggttgtaaattttaggttgggggtttttggggatagggatgtaggtgtttaaggatatgattttttaggtagtggatgtttttgtttgggtggagggtatggttatgagagtagggtttgtgttttggtattttggtgtttgggttttttgtttttaaggtttgttttgttttagtttagttttttttggttaggtttattattgttagtaaatatttttatattgttgtttttttagatggttatggtagtttttttggggtttgtgtttgtagtttttatgtagtttggttggttgatggaaatgtatatttatattttgttttattttattttgagttgggggtttggggattataggttttatttgtataggttgtatttggggaatgggtttgtggtagaaaatgtgtggtgtggggtggggggttttaattaggtagttttaatttggatttttttttatttttgttttatttttttgtttttagtatatggtggtggagtgtgtggggttagtttggtgggggttttgttttttgatttgtatttagagaatagagtattttatgggagagagtagtttggaatgtagtttgagtaatgttgattttatattagtatatttagtgtttttatgtttttgttggtttaggttttggagattatgatggtatttatagtggattttgtaaaggagtgtggggattttgaaggttaggttattttttagaggggggttttatgttaaagtagatggtgttggtgttgtagggtgtttgagatttatggtggagtttgggtttggtgtgtgggaggtggttatgatggtgttttttttttaggaattttgggagggattttaggatttagtgttagggtagttttggtaggtgtagtgaggtagtgatttgtgggggttagatgtgggtttgttttatgtgggtagggattagttaggtatgggggtttagtggatttgagtggggttatagagttttggaggatttttttgtataatgaatttttgtttaaaaatagagattaagaggaagttttattttgtagttttggaaatgggtggttgtgtgtttggggtttttgttatgtgggaggatagtttagaggtattttggttttaggtagttggtttttaggttgtgttttttttattggttgggtattggttggaatggtatgaggattagttttattgtttttagaggggttttgggttattgggtgtggtggtgttggaggagttttgtttgttgtgggttttggagggtatggtagtagagtttttggtttttttaggtagagtggtatttgttttatagattgtgttagttttggttgtaggtgttggggttttattgtgttttttgggggggtttggattttttaaggttttgatttgaagttttgaggttttatggatgtttgtttttggtttgataaatgagatggttgtggtggggaggagttttaggtggtttgggattttttggtgtttgttgttgggaggtggagggatttagagttgaggttgtgtttaggattgttttgggtgttgggtgatgttaatattttgtgttggtttttgttaaggggttggtttttgggtttttgttgttaagtgtgtggtgtggttttggtttttaggttagatattgttgatatgggttttttttgggaaggtagtgggatttgtggttttgtttaggggttgtttttgtttgatgtagtgtggtttttgtattgaaatgggttagagataggtgaggttagagtgggatttggatagtagggatagtgtaggttttagtttttattggaggtttttgggagtgggtatatggtataggtgtttggggttgtttattttgattaggtgggaatttagatgttttttgtttttaaggtgtttttagagttttagtttgggaaagggatggtttttttttgtttggttgtgtttttttatttatattttgggttttggggtttggataagggttaggtgatttttgaagatagagatgtgggttttagagtattatgtattttagggggtgataagtaggttgtagttttaagattttgaatgtgattttatttagaagaaggggttttgtagggggttatgttagggttttaggtgtgattgtttagggttttttgggtaggttttgaaataatggttagggtttatttgagagagaggtagagagagaagatgtagaggtgggggagatgttgtgggattaggggatagagatgggtaatgtagttatagatgtttgagttggtaggggttgggaaggtagatagtgttttttttggagttttgggaagtgtgtggttttgtttgttttttggttttggatttttgaattttaggatagttagattaaaggtttgttgttgaagttggtagttttggggtatttgggtattgtggggtttgttgggtatttgtagatagggttgttttagggatggggtatgtttagttttgatggagaatggtttgttttttaaaggtatggttatttgtttttatgatagatttttgtatagggggatggaggttgggtgagttttgtttatggttttggagttgtgtggttgtgtgttggttatttagtttgtgtttgtggttttgtatataaaatgggttttaattgggttgatttttgggtttgtttgatttagtattattgaagtgatggttgtttaggagggtttggtggaggttggttgtgtttgtttttgggtggagttggattttaaggaggagtaggtattgggggtttgttttgttgtggtgggttttttttttttgtagattttatgttttgggaataggaaagagtatggaagttatggggattaaaggggggtgggtagggggtgttggttaaatttagttgagatttagagtagggggtattagttaaatttggttttggttttgttttgtgggtgggttttttggggatttgggtaggggtggttgagatttagagttaggtaaatttgtttggggataaatttatagagtattttgggattggtttagagatgggaaattttatagggggatgtgatagttgttgttatttgaggattgtggtggggggattattgtagttttgaaaaggagagaaaggtagagtgaggatttgggatggtttggtataggtatatgtggttagggatgtttagtttggatgatgtgggttatttatggttttgttaggttgtagggttggagttgtgggggagaaagtggagagttattttggagtttaggagttgttttaattttagtttagtgtagtgtttgggatagtagagtgaggagttgttttagttttagtttagtgtggtgtttttggagtagtagaggttttggggttgtagggttttttttaatttttttttgtggtgtattagtttggtttttggttttgttatatttttttggggtatttataggtgtgggggtttttttagtattttaggtgagtttttgttttttggatttatttttttgttttagtagaggggataagttttttttatgagaagtgtttttttaggttttagggttttaggggaagggttgtttttttatttttttgggaggagttttaggtatgaggtggttttgagttttatggttgtgggtttttgtttttatggtgtttttgtgatgggggtgttgtggtattgtggttaatttggttttttgttttgtggttattagggttgattaagttttgagttttgttttgttttaagggtgtttataggtagagatgttgagtaggttgggttttttggtgtttggttgtgtaggagattttggtagtgggtttttgattggaggttgggttttgagattttgagagaggttgagggggatggataggggttttatagtagttaggtggggttgtttagagatttgggaggaggttttagtttggttattatagtttggttaagtgtttattttggggtttgaattgttggttggattatttgtttggtagggattttgtgggggttggttttggataatgagggtaggtattatggattttgtttagaatttgtttttgtttgaaggtattatagttataaggttgtttttttagtgggaaggggttagtgtttaggtttggggtgattgtgtgtatggtgtggtgtaggttggggtgtgggttttgtattagtttggttagttttgattttaggagaggggaggggggattatggttgttggaggagtttaggtaagtttaattgttgagagttatttagttttgttttatttgttttttgtgatgttttgagggttttggggagatgtttttgttggaagagggttttagtagaggttttgggttttgaggaaggttttttggtgttttgattttttaaatttatatatggttgtttttgggaagtgatgggtttttttatattgggatttaaaagttataggataggttttgtttttttttggtttttgttagtttgttttggtttgggatattttagttttaggtttatttttatggttggatgttgtttgttttgtgtttttttgtggggtaggtgttggtttgggagatatttttgttttttttgtagtaggttttggggagtttattggagtgtttgaggtagaagaatttagttatggagaggatgaggttggagttaatgaagaatgtgtttaggaagagggaggtggttatgtgtggagtttttgtaaatagatattgttgagtagatgggtaggatggtggttttggttttttgtttggtttttggtgttttttgtatatggtagatgtgttgttttttgaatatgtttgagttttatgggattggttgtgggtgttgagggttttgtatatgggtttgggttatttttgtaggtttagttatgtttgggtatttggttgtggggtttgggaaagttattatttgttttggttttagttttttttaggagtttggatgttgggagtgttataggggttgattttggttgggttttgtggaaatatttttttgattttagttgtttttgaaagttagggggtttttagttttgtttttttttttgggtttagtataggttttggggtttttatatagggtagagttttaagttggtagtaggtgtttttgtattttatttatttttatttgtttgggttaggataggttagggttgttggtttggggtttgggatagttggtaatggttgttgggtgtgttttgagatgttggggaggagattttttaattttgagatataggtgtgtttgttaggtttgggggttttgtttttttttgttttagtatagagttataggaggttaggagtttatttaggttaattttattttaaaatattgttatttaggttagtaatggatttaggttagtttagggttgtgagtgtgaatttgagagtgtgtagtgtggttgtgagtgtgaatttgagagtgtgtggtgttagtgtgagttgtgagtgtgagttttaagtgtgaatttaagagtgtgtggtgtggttgtgagttatgagtgtgaatttgagagtgtgtggttgtgagttgtgtgattttgagagagtgtggtgtggttattagggttttttttaattatggttttttagagatgtggtagagttttttatgatgttttatattttttatttatattagttgattttaagttgtaggggttgttatgtttttttttggttgttttgtagaattttgagtttgttgtggttgtgttaagggtgagggtttgtattggttttgatggtttttagtttttaggatattggtagaggtggttgtggtttgttgagatttattaggatgtggttgtttgggggtttttgagtttttgtttatggggaatggtgtatttgggttagtaattgtgggatagtagaattgtgggaagtttgtgtgtatggagtttatggggatatttatgtgtattttgaagggattttaggatggaaatatgaaagtgaggggttgagggggtggagtagtttttattatagagttgttttgaatggtttagtagatttgggaagagggggtttttggggttgttttttagtggatagtggttttggggtaaggtggggatatagatagtaatttttatagtgttttttatagttggagttgtgagaagggagttggggggagttgggtagatttatagtttttatatttggagttgttgtaggttgggagggttttgtttttatagtggatgtagttggtgtttttgtttgtgttttagtgtttgtaatagtttgtgtggggtagaggatgggtatgttagttaaagtaaaatttatattagttgggttttttgggaatgattttttatttgagttggtgagataatttttattttagatattaatatgttttggagggtaggtgggtggtagataaggatatttttagggagtatggtggggttgtgagtattttatgttgagtattttatattgtgtattttgattttgagtattttgattttaagtattttatgttgtattttttatgttgagtattttggttttgagtattttatgttgtattttttatgttgagtattttagttttgagtattttatgttgtattttatgttgagtattttggttttgagtattttgattttgagtattttatattgtgtattttagagagtggtaggtggtagtatttagaatgaataggtttgttggagggatttgtgttttgtaggattgtaggttgggtttggtttttattatttagtttttattttatagattttttaagaatttttattgtaatgtttgttttaggttttttttaagattttttttatgttttttttaggattttttaatggttttttttaggattttttttttatggttttttataggatttttgtatgttttttttagggttttttatgtttttttgggatttttttatgtttttttgggatttttttatgtttttttaggatttttttatggttttttttaggattttttatgttttttttaagatttttatttgtagtgtttggagtggttgttttgtattttgtgtttttttatgttgtttaagtaggataggtttatttgttagtagtatagttttttgttttaagttgattttgatttttggtttatttgttatttttatattttggtatttttttttgggttttttttgggggattttgtagaattaagttttatttttttgttaggttgatgttgtgtttgaagttttatttttgtttattggttagggtgtttttaaggataggaattgatttttattttttgattttttaaatatttttaatatttagtttagagttgagtagatatatttttgatgttgattgtggtgtggttgttggtgtgggttatgggtggattatatgttttgatttttttttatagattgatttgaatataaatgggttgtggtgatatggggattttgtggtggagagtgggtttgagattttggtatggttgtgataggggttattttgtagatatattttttggaagaatggaagtttatttgtttagttttattagggtggagttgtgtttttttagtattgggggtagtttttgttttttggtattttttggtatagggtttgggtgattttagtgaggttttgtttgagagtttttgttttggaggttgaagaatggagtttatggtagggagttaaatattagtgtagtattgtttttagaagtgtttgttgtttttttgagtggagatgtgatttggtttggggttgtatgtagggggaagtgtatttaatattgtaggtttggtttttttttatgtgtgttagatggtttttattttgtgtttgtgtatggggttattttggtttttggattttatgatttgttggtttggtttttttatgggtattgtgattgttgtatagttgtttgtatttatagagtgtttggggtatataattttttataggagatgttatggttttagtatttttgttgttatggggtgttaggggagtggtttttatttagttattagggttttagtattagatgatgaggattttaaggtgtttagtttttttttagtttttttgtttttttttagagtggtgtttttttttttttattttgtgtgtgttttagatgttattattgtttttttgtgggttttttaatttttatgtttagttttggatttttgtgtttagttttattggttgttatagttgttgttttgattatgttttttttatgaggtttttgagtttttaggagtagtttttttgggtttttttattatgggagggttggatttttaggatgggagtgttaaggtttttggaggtatagttggggtattttagttttaagtttattaagggttgttaaggagtggtttttgtatttttttattttgttttttttttttttggttgtttttattggttgtttttattagttttaattttttgatatttagttgtttttagatagttttttttgtagttttttagaatttttgatgaatagggtttgtttgtggtatgttgatataggttggtatttttgtggtgttttgttgattggtattttattttatgtattaggggttagtagtatttttgtttgagtatggataggtaaaaatgttttgggttttgttagaggtttttggagttaggatagttttgtgagaatggttgagtttatgggttatttttttagatttttttttaggtatttttttgattttagtttttgtttttgtttttagttttttgttgggttagtttttttatgaggttgttgtttaaggttgtttgttagaaaggaggtttagatgtttttttttaagttttatagtttttattgttttatttattttttaggttttgtagtatagatgagtattgtttttgttattgaggggagggttttgggtatatatatattagtggtttaggggttggtttggaatttgtttgggataaagtggtttatttggattatatagatttgtgtttgggtagttggtgttgatgtttattatatttatatagtatttgggtagttgggtttggaggggatatggtagtgaaattttaggatgtgtttgttaggtaggtttatgtttagagtagtagtggttgaggggtgttgtgggagtatattttaatgtttgtagttttggttttttttggagttagtattgggtggttttttgttttttgtgggtttgggagtaaggaggggttttatagttatagtgtatatttttgtgggattttgggtgggtggtttttaaggaaaagttgggtttggaagagtaaattatttttaggaggtggtatttgtaggttatggtagtgttattgatattttttgtaagtttttggaggttttttattaggggtttttgtttgattttatagaggaagtgtttgggtttggttggtattttaggggatgaatttatgtttaggtgtttaggtattgtataggtgtgttgggtgttggtatttatggtgtgtgtgagggtttattttttgattataggtagattggataggtttggggggtttagggtatttttagtttgtgtgttgattatagttgtgttgttttttgtgatttgaatgtagtgaatggtgagggtgtttaggggtgattgtggagtgtgggatagaatttatattgttagggaggggtttaggtttggttttttaaatgttttagttaggatagtgaggggtttttattttttatttgttttgtttgggagtttggagttgttgtagttatattttttgatagtgatgtgtggtatgttgtgttgttattgttggtagaggtgtttttattgtgggttaggatgttttattgtgggggttttgtttgatttagttatttttgagtaggtgtttatttagtaggtagtggagggtttttttttgtgaggtataggtttttttgattttagtagtggatttggttagtatttttggggttgggatattagtgttttaaaggtggaagggttagattttttaggggaagggtttattgttttttatagaggttttggtttaggttgtgtggatatgtgaggggggtatttattgtgttttttatggatttgttggtgatttttatgagaaggttagttaggagggtgaggtgttgtagtgttatgttaggagtagatgtgtagagtttgttatagggaggagtatgtggagttaaagagatggagtggggttgaggtagggtgggtggggttaaatgaaagtggggttaagagatgttgggggggtgtgggttaaggtaaggagggtagagttaaatggagatgggtggggttgtggtggagggtggggttaaatggaagtgggtggggttgtggtggagggtggggttaaatggaagtgggtggggttgtggtagggagggtggggttaaatggagatggggtggggtggggttgtggtagatgattgagttaaatggagatggggtagggttgtggtaggggtgtagggttatgatagggaaggtggagttaaatggaggtggggtgaaagagtgaaggtttggggtttttggaggtatgggtggggtgaggtgtaggtagggttttatttgtttttttaggatggggattattgatattagttttttgtttgtttgggtgtttaggggttagttttgggagtttatgggtttagttgagttttgtagattttggtttagttttgtagatgaagatagtaggtgaggttgtggttatgtgagggtaatttaggtgggttgtggtttatggtgtggggtttgggtttggtttgggttttttgtttatatttttgttggtttttggttgttgagtagggtgttttggaggggttgtttttatgagtgttttttttgagttggttttttggttttttgtgggtgagagtgtttgggatataggtttttgttgggatatgggtttttggtttggtttttgtttagggattaggtatggagtttagtggtttaggttgtatttggtggatattggtttttttgtataaatttttttttttttttttgtatttttagttataggatttgttattatggttttgtttttttaagggaggaaatgtttgttaggtgtataaatttttaagtggtgttattgtattggtttaggggtttttttggtaagttattttgaggggggttgaggtttagttaggtttgtggggttttttttgatgggtttaggttggggttttgggataagggttgtgagtagtagggagatggaggttttggaggatatagttttagtttttgtatagggatggtttattttttgtatagggatggtttattttgttatttattttatgttggatttaggttatggttttataaattgattaggttgtttaggtgtgagtttgttggaggattttggaaggtgggggtggttggaatgtttgagtttaggagttggagatttatttgggtaatatagtttgtttttataaaaagtttaaaattagttgagtttggtggtgggagtttgaggttttagttatttaggaggttgaggtgggatgattatttgagtttagaaggtggaggttgtagtgaatggagattgtattttagtttgtgtaaggggaattttgttttaaaaaaaaaaagtatgtttttttttgatttagttttttttttttgatgtgaaatttttttagatggaatgtgttgaagttatagatatgttgtttgttttatttatagagtgtaattaagttttagtttgtttttttgtttttttaatatttgtttagtagagattgtttttttttgtttagtggaaaattttagatattatagatttttttgttttttttttggttaaagggtattttgagggttatattaagttataaaatattattttgatttaggaattagaagtttaagattttaattaatatttttatttgttatttagttaattttatggagatttattttatatataataaattatatttgtgtaaagtatataagtgggtgagtgtgattatttttttgaagttgttattatagttaggatggtgtttggttttatatagttgttagtatttgttgtggtttttataagtttgggtttttggtagttaggagttgattagattgtagttgtattttttagggttttatataaaggggttgtatatattgatttttagatttttttatgttgttttatttgtattttttttttttttatagttggaggattttttattgtgttggttaaatgttattgttt

SEQ ID NO: 284 - DNA, 13135 bp, Artificial Sequence
  chemically treated genomic DNA (Homo sapiens)
aggtggtgatgtttggttaatatagtggaaaattttttgattgtggaaaggaagaaagtgtggataaaataatatggaaggatttaaaggttagtgtgtgtaatttttttgtgtaagattttagaagatatagttgtagtttggttagtttttggttgttgggagtttgggtttgtgggggttgtagtgagtgttggtagttgtgtgggattgggtattgttttggttgtggtggtagttttaagggggtggttatatttatttgtttgtgtattttatatggatgtggtttattgtatgtaaagtagatttttatgaagttgattaaatagtagatgaaagtgttgattgaaattttggatttttggtttttgaattaaaatgatgttttgtgatttaatgtggtttttaggatgttttttaattagagagggagtagaagggtttgtgatgtttggagttttttattgagtaggggaagatggtttttgttgggtaaatgttaaagggataaaaggataaattaagatttgattgtattttgtgggtggggtgagtagtatgtttgtgattttaatatgttttatttgaaaggattttatattagagaggaggagttgaattagaggagagtatgttttttttttttgagatggagttttttttgtataggttggagtgtagtttttgtttattgtagtttttattttttgggtttaggtgattattttattttagttttttgagtagttgggattttaggtttttattattaggtttgattaattttaaattttttgtaaagatgggttgtgttgtttaggtgggtttttaatttttgagtttaagtattttgattatttttattttttagagttttttggtaggtttatatttgggtagtttggttagtttgtgaggttatgatttgaatttagtatggaatgggtgatagagtggattgtttttgtgtggagagtggattgtttttgtgtagagattggagttgtgttttttagggtttttgtttttttgttgtttatagtttttgttttaggattttggtttaggtttattaagaggagttttataggtttggttgggttttagttttttttggggtaatttgttagggaggtttttgagttagtgtagtgatattatttgaggatttgtgtgtttggtaggtgtttttttttttaggaaggtagggttatggtaataggttttgtggttggaagtgtaggggggagagagggggtttgtgtgggaggattggtgtttattaagtgtagtttgggttattgagttttgtatttggtttttgagtaaaggttgggttgagggtttgtattttagtgagggtttgtattttaggtatttttatttgtaggaggttaggaggttagtttgggggaaatatttgtggagatagtttttttaggatgttttgtttgatagttaggggttggtaagggtgtggatagagggtttggattggatttagattttgtattgtaggttatggtttatttgggttgtttttgtgtgattatggttttatttgttgtttttatttgtaggattgggttggggtttgtagggtttagttgagtttatgagtttttagagttaatttttgaatatttaggtgggtaaagggttgatgttggtagtttttattttggaggggtaggtaaggttttgtttatattttgttttatttgtgtttttaaaggttttaagtttttatttttttattttatttttatttggttttattttttttgttgtggttttgtatttttgttatggttttgttttatttttatttaatttagttatttgttgtggttttgttttattttatttttatttggttttattttttttgttatagttttgtttatttttatttggttttattttttattatagttttgtttatttttatttggttttattttttattatagttttatttatttttatttggttttgttttttttgttttggtttgtatttttttaatattttttgattttatttttatttggttttatttattttgttttagttttattttatttttttggttttgtatgtttttttttgtggtaggttttgtgtatttgtttttggtatggtgttgtggtattttgtttttttggttggtttttttgtgggagttgttagtaagtttatggagaatatggtaggtgttttttttatgtgtttatgtggtttaagttagagtttttgtggagggtggtgggttttttttttagagggtttaatttttttatttttaggatattgatgttttagttttagaggtgttgattaggtttattgttggggttagaggggtttgtgttttgtagaggggagttttttgttgtttgttgggtgagtgtttgtttaggaatggttgggttaggtggggtttttatggtgaggtattttggtttgtaatgggagtatttttgttagtggtgatagtatagtgtgttgtgtattgttattggggagtgtagttgtggtggttttagatttttaggtggagtgggtggagggtggggattttttattgttttggttggggtgtttgagggattggatttgggtttttttttggtggtgtggattttattttgtattttgtagttatttttggatgtttttattgtttattgtatttaggttatgagaaatagtatagttgtgattaatatataagttgagggtattttgagttttttaggtttgtttagtttgtttgtggttagggaatgggtttttatatatattgtaagtgttagtatttagtgtatttgtgtagtatttgggtatttgggtgtgaatttgttttttgaaatgttagttaggtttgggtattttttttgtggggttaagtggaaatttttgatggagagtttttggagatttgtagagaatgttggtggtgttgttatggtttgtgggtgttgttttttgggggtggtttatttttttaggtttagtttttttttggagattgtttatttagggttttatagggatgtgtattgtggttgtgaggtttttttttgtttttaggtttataggggatagagggttatttgatgttgattttagaagaggttggagttgtggatattgagatgtgtttttatggtattttttagttgttgttgttttgggtgtgagtttgtttggtaggtgtgttttggagttttattgttgtgttttttttaggtttagttgtttgagtgttgtgtggatgtggtgggtgttaatgttagttgtttaggtgtaagtttgtgtggtttaggtaagttgttttgttttaagtagattttagattggtttttgagttattggtgtgtgtgtgtttagggttttttttttggtgataaggatagtgtttatttgtgttgtgggatttggggagtggatggggtagtgagggttgtggagtttggggaaggatatttgagttttttttttggtgggtggttttgagtggtagttttatgagaagattggtttagtagagggttgggagtagaggtaggagttgagattagaaaggtgtttggagaagggtttgggggagtggtttatgagtttagttatttttatggggttgttttggttttaggggtttttggtaaagtttaagatatttttgtttgtttgtgtttgggtagaggtgttgttggtttttggtgtgtggagtggaatgttaattaataggatgttatgaggatgttggtttgtgttagtgtgttatgggtaggttttgtttattagaggttttgggaggttgtggaagggattgtttgggggtagttgggtgttaggaggttgaggttggtgagggtagttagtgggagtagttaggggaggggaggatagagtgagaaggtgtaagggttattttttggtggtttttggtgaatttggggttgagatgttttagttgtatttttaagggttttggtatttttattttgggggtttagtttttttatgatggaagaatttagaagggttgtttttggggatttaggggttttgtgaggagggtgtggttaagatggtggttgtggtagttagtgaggttgggtgtgggggtttgaggttgggtgtgggggttggggagtttataggaaggtagtgatgatatttgaggtatatgtagggtaggaggaggagggtattgttttgagggagaatagaggggttgggaggaagttgagtattttggggtttttattgtttgatgttgaagttttggtggttgggtgagaattatttttttggtattttatggtagtaagagtgttggggttgtggtgttttttgtgagggattgtgtattttaggtattttgtgggtgtaggtagttgtgtagtagttatggtgtttatggaggggttaggttagtgggttgtgaagtttaagggttgaggtggttttatgtataggtgtagggtggggattgtttggtgtgtgtggggaggggttgggtttgtggtgttggatatgtttttttttgtgtgtggttttaagttaggttatgtttttgtttggggaggtagtgggtatttttggggatagtgttgtgttggtgtttggttttttgttgtggattttgttttttggtttttggggtagagatttttagatagagttttgttgaagttgtttgagttttgtgttaggagatgttgggagatagaggttgtttttagtgttgggagagtgtagttttattttggtaggattgagtgggtggatttttatttttttaagaggtgtgtttgtagagtgatttttgttataattgtgttggggttttaggtttattttttattgtggggtttttgtgttgttgtggtttgtttgtatttagattagtttgtgaggaagggttgaggtgtgtggtttatttgtggtttgtattagtagttgtattgtagttggtattaagagtgtgtttatttagttttgggttgagtgttggagatatttagaaagttaaggagtaaaagttaatttttgtttttaaaggtgttttggttggtgggtggaaatgaggttttaggtgtagtgttggtttggtggggggatgaggtttggttttgtaggattttttgagagagatttgggggagggtgttagggtgtggaggtgatagatggattaagggttgggattagtttggggtaggaggttgtgttgttggtgggtgggtttattttgtttgggtggtatgagggaatatggggtgtgaggtagttgttttaggtattgtagatgggggttttgggggaggtgtggggggttttgggggaggttgtgggggggttttggggaggtgtgggagggttttagggaggtgtggggaggttttggggaggtgtgggggattttgggggaggtatgtgggggttttgtgggaggttatggggggggggttttgggggaggttgttgggggattttaggagaggtgtggggggggttttgggggaggtttggggtaggtgttgtagtgggggtttttggggagtttgtggggtgaaggttgggtggtggaagttgggtttagtttgtagttttgtagagtatgagtttttttaataggtttgtttattttggatgttgttgtttattattttttgaagtatgtagtgtggagtatttagggttggggtgtttagggttggggtgtttggtgtggagtgtagtgtggagtatttggggttggggtgtttggtgtggagagtgtagtgtggagtatttggggttggggtgtttggtgtggagagtgtagtgtggagtatttggggttggagtatttagggttagggtgtgtagtgtggagtatttagtgtggggtgtttatggttttgttatgttttttgggggtgtttttgtttgttgtttatttattttttagagtatgttagtatttggaatgaaagttattttattaatttaaatagagaattatttttaggagatttagttggtgtggattttgttttggttgatatgtttgttttttgttttatgtaggttgttataggtgttggaatgtggatgggagtgttagttgtgtttgttgtgggaatggaatttttttagtttataatggttttgagtgtagaagttgtaggtttgtttggttttttttggttttttttttatagttttagttgtgggagatattgtgggagttgttgtttgtgtttttattttgttttagagttattgtttattggggaatagttttgggagttttttttttttgagtttgttgggttatttgggatagttttgtggtgagggttgttttgtttttttagttttttgtttttatatttttgttttgagatttttttagggtgtatgtgggtgtttttgtgggttttgtgtatataggttttttatagttttgttattttatagttgttggtttgggtgtgttattttttatgaatagaagtttagggatttttgggtggttatattttggtaagttttagtaggttatagttatttttgttggtgttttgggggttgggggttgttggagttagtgtagatttttatttttgatgtagttatagtaggtttagggttttgtaaaatagttagaggggagtgtggtagtttttgtagtttggggttagttggtgtgggtgggggatgtggggtgttatggggggttttgttatatttttaaagggttgtagttaggggaggttttgatggttatattgtatttttttagggttatatagtttatagttatatgtttttaggtttatatttatggtttatggttatattgtatgtttttaggtttatatttaaggtttatatttatggtttatgttgatattatatatttttaggtttatgtttatggttatattgtatgtttttaggtttatatttatggttttgagttggtttgggtttattgttgatttgagtggtagtgttttagggtggggttggtttggatgggtttttggttttttgtggttttgtgttggggtaggaaggagtgaggtttttaagtttggtaaatatgtttgtgttttagggttggggagttttttttttagtattttagagtatatttagtagttattgttaattgttttgagttttaggttagtagttttggtttgttttggtttaggtaggtggaggtgagtggggtgtaggagtatttgttgttagtttgaggttttgttttgtgtgggggttttagggtttgtgttgagtttggaggaaggaataaggttgagaattttttggtttttaggggtaattggaattggagaggtgtttttgtagagtttggttagggttagtttttgtaatgtttttaatatttgagtttttgagagaagttgaggttggggtaggtggtaatttttttagattttgtggttagatgtttaggtatggttgagtttgtagggatgatttaggtttatgtgtagagtttttggtatttatagttggttttgtgaggtttaggtatgtttagagagtagtgtatttgttatgtgtagggggtattgggggttaggtgaggagttagggttattgttttgtttgtttgtttagtggtgtttgtttgtaggggttttgtgtgtggttgtttttttttttttgggtatgttttttattagttttggttttattttttttgtagttgggtttttttattttaagtgttttagtaaattttttagggtttgttatagaagaaataaaggtattttttggattagtatttgttttatgggagggtatagggtaggtggtatttagttgtggagatgggtttgagattggagtgttttaggttagagtaggttggtagaggttgggagggagtagggtttgttttgtggtttttgggttttggtgtgagaaggtttgttattttttggaaatagttgtgtgtggatttgaagggttgaagtattaaggggttttttttggggtttagaatttttgttggagtttttttttggtagaggtgtttttttggggtttttagggtattatgaggggtgagtggagtggggttgggtggtttttggtagttggatttgtttgggtttttttagtagttatggttttttttttttttttttggggttagggttggttaggttggtgtagggtttatattttagtttatgttatgttgtatatatggttattttgggtttgggtattgatttttttttattggagagatggttttgtgattgtggtgtttttaggtgggggtgggttttgagtagggtttgtggtgtttgtttttgttgtttagggttggtttttgtagggtttttgttaggtagatggtttagttagtagtttggattttaaggtgagtatttggttagattgtgatagttgagttggggtttttttttaggtttttgggtagttttatttggttgttgtgagatttttgtttattttttttaattttttttggggttttagggtttagtttttagttgggagtttgttgttagggttttttgtatagttaggtattgagagatttggtttgtttagtatttttgtttatgggtatttttggagtagagtagggtttagggtttggttagttttggtggttatgggatgagaagttaggttggttatgatgttatggtatttttattgtgggggtattatggaggtagaagtttatggttgtggggtttaaagttattttgtgtttgaggttttttttgggagggtgggagggtagttttttttttgggattttggagtttggggagatgttttttatgaggggggtttgttttttttgttgaggtgggaaggtgggtttagggagtggggatttatttggggtgttagggaggtttttgtatttgtgagtgttttggaggaatgtggtaggattgagggttaggttgatgtattgtagggagaggttgggggagattttgtagttttggggtttttgttgttttgaggatgttgtattgggttgaggttgaggtagttttttgttttgttgttttggatgttgtattgggttgaggttgaggtagtttttgggttttagggtgattttttgtttttttttttatagttttggttttgtagtttggtgaagttgtaagtaatttatattatttgggttgagtgtttttggttgtgtgtgtttgtgttaggttattttgagtttttattttgttttttttttttttttaaggttgtaatgatttttttgttatagtttttaggtaatagtagttgttgtatttttttgtggggttttttatttttgggttagttttagggtgttttgtgggtttgtttttaaatgggtttgtttggttttggattttggttatttttgtttgggtttttaggagatttatttataaggtagggttagggttggatttggttggtgttttttgttttggattttagttggatttggttggtgttttttgtttgtttttttttaatttttgtgatttttatgtttttttttgtttttgagatgtggggtttgtaggaaaggaggatttattatgatagggtagatttttaatatttgtttttttttgaagtttagttttatttgaggatagatgtagttggtttttgttaggtttttttgagtagttattgttttagtggtgttgggttaggtggatttaagagttagtttggttaggatttattttatgtgtggggttatagatataggttgagtgattggtgtatagttatatagttttaaggttatgagtagggtttatttggtttttgtttttttgtgtagaagtttgttatgggggtaggtgattgtgtttttaggggatagattgttttttattaaggttggatgtgttttgtttttaaagtagttttgtttgtaagtgtttagtagattttatggtgtttgagtgttttggggttgttagttttaatagtagatttttaatttgattattttagagtttagaagtttaaaattaaggggtaaataaggttatatgttttttgaggttttggggaggatgttgtttgtttttttagtttttgttggtttaggtatttgtggttgtgttgtttgtttttgttttttggttttatggtgttttttttatttttgtgttttttttttttgttttttttttaggtgggttttggttgttgttttagggtttgtttggggaattttgggtgattatatttgagattttgatgtaattttttgtaaagtttttttttttaaataaggttatatttgaggttttgggattatggtttgtttgttgttttttgaggtgtatgatattttgggatttatatttttgtttttggggattgtttggtttttgtttaggttttggggtttagggtgtaaatgagaggatatagttgggtaggaggaagttgttttttttttgagttggagttttgagggtgttttaggggtagggggtatttgggtttttatttggttagagtaaatagttttgggtgtttgtgttatatgtttatttttgagagtttttggtgagggttgaggtttgtattgtttttgttgtttaggttttattttgattttgtttgtttttgatttgttttagtatggaagttgtgttatgttaggtgggagtggtttttggatagggttatggattttgttgtttttttgggggaggtttgtattagtaatgtttgatttggaggttgagattatgttatgtatttggtggtagggatttggaggttgattttttggtgggaattagtataaagtgttggtattgtttggtgtttgggatagttttgggtatagttttggttttgagtttttttgttttttagtgatggatgttaaagggttttgggttgtttgaggtttttttttattatagttattttgtttattggattaggagtaggtatttatgagattttagagttttagattgaggttttggggggtttgggtttttttaggaaatatggtgaggttttagtgtttgtagttaaagttggtatgatttatggggtaggtgttgttttgtttagaaaagttaggggttttgttgttgtgttttttagagtttatagtgggtaggatttttttagtattattatatttagtggtttgagatttttttgagaatagtgaggttggtttttgtgttgttttagttggtgtttggttagtggggaggatatagtttaggaattagttgtttgagattagggtgtttttgggttgtttttttgtgtggtggagattttaagtatgtagttatttatttttggagttgtaggatagagtttttttttgatttttgtttttaagtagaaatttattgtgtagaaaagttttttagagttttgtggttttgtttggatttgttggatttttatgtttggttgatttttgtttatgtggggtaggtttatatttaatttttataagttattgttttattgtatttgttaaggttgttttggtgttgagttttggggttttttttggagtttttgggagaaaggtgttgttgtggttgttttttgtatgttaggtttgggttttattgtgggttttagatgttttgtggtattggtattgtttgttttagtatgggatttttttttgaggggtggtttggtttttggggtttttatgtttttttgtgaagtttattgtgggtgttattatggtttttgggatttgggttagtgggaatgtgggggtattgggtgtgttgatataaagttggtattatttaagttgtgttttgagttgtttttttttgtaggatgttttgttttttaagtgtaggttggggagtaaagtttttgttaggttggttttatgtattttgttattgtgtgttgggggtaaggaggtgggatgggggtggaggagagtttaggttggggttgtttggttgggattttttgttttgtgttgtatattttttgttataggtttattttttagatgtaatttgtgtaggtgggatttgtggtttttgaatttttagtttggagtgaggtgggatagagtgtgggtgtgtgtttttattggttggttgggttgtgtgggggttgtagatatgggttttgggagggttgttatggttatttgggggggtagtagtgtgggggtgtttgttgatagtgatgggtttggttagagagggttgagttggggtaggataggttttgagggtagagggtttgggtattaggatgttagagtgtgggttttgtttttgtaattgtgttttttatttaggtagaaatgtttattgtttggagggttgtgtttttagatatttgtatttttgtttttaaaaatttttagtttgaggtttgtagttagggagtatttgggggagtattggttttgttttgggttttggtttaagaagtgttttggggttgggagggttattggttttggggagaaagggagggattggatagtttaaggttattttgagtttagtatttattgttttatttgatgttttgggttatgtttttgtgatgtgggagtttttagattttttttgtggggaaggagatagggattgagatgggagtagagggaaggagatagggattgaggtgggggtggagggaaggagatagggattgaggtgggggtggagggaaggagatagggattgaggtgggggtggagggaaggagatagggattgaggtgggggtggagggaaggagatagggattgaggtgggggtggagggaaggagatagggattgaggtgggggtggagggaaggagatagggattgaggtgggggtggagggaaggagatagggattgaggtgggggtggagggaaggagatagggattgaggtgggggtggagggaaggagatagggattgaggtgggggtggagggaaggagatagggattgaggtgggggtggagggaaggagtttatatttttttggaaattttatttttgtatttgtattaggttgggtgtttggtttggaggataaaattggaaataggtatgaa

SEQ ID NO: 285 - DNA, 4852 bp, Artificial Sequence
  chemically treated genomic DNA (Homo sapiens)
tttggttgattgtaagttttgttttttgggtttattttatttttttgttttagttttttgagtagttgggattataggtttttgttattaggtttggttaaatttttttttttttttgagatggatttttattttgttgttaggttggagtgtagtggtgtgattttggtttattgtaagttttgttttttgggtttatgttatttttttgttttagttttttgagtagttgggattataagtgtttgttattatgtttggttaattttttgtatttttagtagagatggggttttgttatgttagttaggatggttttgattttttgattttgtgatttgtttattttggttttttagagtgttggggtaataggtatgagttatgatgtttagttttggatatatattttgaaaggtaatggggtgataaagagaggaagattgggttgggtgtggtggtttatgtttgtaattttagttttgggtggttgaggtgagtggattatgaggttaggagtttgagattagtttgattaatatggtgaaattttgtttttattaaaaatataaaaattagttgggtatggtggtgtatgtttgtaattttagttattttggaggttgaggtaggagaattgtttgaatttgggaggtggagaggttgtagtgggttgagattgtgttattgtattttagtttgggtaatagagtaagattttgttttaaaaaaaaaaaaaaaaaagagtaagattgtagaagtggtatttgggtgtttgggtgggaggaatttgggagtttgatttttagatgtaagtttgaaatatttaggttgggtgtggtggtttatatttgtaattttagtattttgggaggttgaggtgggtagattatgaggttaggagatgagattattttgattaatatagtgaaattatgtttttattaaaaaatataaaaaattagttaggtgtagtggtaggtgtttgtagttttagttattggggaggttgaggtagaatggtgtgaatttgggaggagtttgtagtgagttgagattgtgttattgtattttagtattttagtttgggtaatagagtaagattttattttaaaaaaaagaaatatttattagatatttaattgggtatgtatattagatagttggatatatgattttggagttaggggatgagtttagaaagaaatataaattatggagttgttagtgtagagatggtgtagaaagttttgatgttgaaggttgggtatagtggtttatttttataattttagtattttgggatgtttaggtgggaggattgtttgagtgagtttaatattagtttgggtaataaaggttggtattataaaggtttgtttttataaaaaaataaaaagttagttaggtgtggtagtttaagtttgttgttttagttatttaggagattgaggtgggaggattatttgagttttggaggttgaggttgtagtgaattataattgtgttattgtattttagttttggggatatagtaagattttagtgttataaatatataagttttgatatggaaagagattattatattttatgtgtttttttatttttgtttattttattatttggtgtttttaagtttaatattttttttgttgatttgaggttatatagtttggtgaaagagggttggatttttggttttttaatatatttatatatgtttgtttaaaatttttagtgttttatgtttttagtttataaagtatagatatagttttaatgagaggtttttatattaggttagagaatgttagttttttttatttttatagagattttaaaaagtatattttagataaaaaagaaaaataagtaattaagattattttagggttgggtatggtggtttatatttgtaattttattattttgggaggttgaggtgggtggattatttgaagttgggagttttagattagtttgattaaggagaaattttgtttttattaaaaatataaaattagttgggtgtggtggtgtgtgattgtaattttagttatttgggaggttgaggtaggagaattgtttgaattttggaggtggaggttgtagtgagttgaattttattattgtattttagtttgggtgatagagtgagaatttgttttaaaaaaaaaaaatgttttttttataaggaattttgaggatttgttggtttaattgtttggatataaagatatatatatatgaagttggagagataggaagaagtgtttaatatagaatattttaagtatttttatttttttttaaggattaaatttttttagagattttttttgttttagttttttaggagttttttgaagatgttaggagttgtttaagaaggttggaagatggttgttgggaaggaattgttggtagttggtaatattttattttaaggaggtggtggtaatagttttttgggtagtagatattatggatttttttttttttgggaattagaggtttttttgtttttggtttgaattttttagagataaagaattttatttttttttatatttgtgtgggattgttggggaggagagggggtggaggggttagatttttatttttatgaaatatttgtgggtttaaagaggagtttggattttgattggtttaggaggtgtgtggggttgtggggtttttttggtttgggttaggtgtgttgttaagatgtttggggaaggggttgtttggtgtaggttggggatgtggagtgtttggggtgtttttatgtaggttatatattggttgtttgtattttttttttttttttttaattttatttttttgtgttttttttttggggagtttttgttttttttttttttttgtggttgtttttgttttttttttttttttagatttttttttggtttgttttttttttggtagtttatttttattttgtttttttgtgtgttttttggtttttgttttttagttttggtttttttttgttggtttttggtttttgtggttttttttttgttttttttgaggtggtggtggttttttttataatagtgtggtttgtttttttttttttggtttttggtgtatttttgtttgtttttttttttgtgtatgtgttttttggttggtggtggttgtggtggtggtggttatgagtggttttgtttttttaaagggaaatgttgaggtgttgggggtgattgtgggggagggggattttgagttgtggagatttttgggagaggtgatagatttttttttttggagtaggagggttttgggtggatttagttttttatttttttttgaggaggaggggggggaaatggaggtttggggtggttgaggtgagttttggggtggggggttggggtggggaagggggggtgtggggtggggagatgaggtgggtttggttgggttagggggggttgaagtgagttttggggatgagtttgggggtggttgggtgtgagtttttgtttttgaggtgaaggtggtggtggtggtagtagaggtggtggtgaggtttttatgggttggtggtgggttttagttgtggtttttatgtttttgtatgttggtgggatggtgtttgggttttggaggagttgtgttagtggaggtttgttgttgtgttgttgaggtgagtttgttaaatttttttttttttttttagtttttgattttttgtattttgttttttttttatttttttttttgttttggtgtttggtgttgttttggattattatgattatgagatttgtggtgtttaaggtggttgtggtttttgttggtggtaattttgagtagtgattggattatgagtgggttgtggtgttgggtgggtttgaggatgagtttggggtggttgaagtttatttttttttttggtattgtaagtttaaggagttggggtttttgttggtttttttttagggtgggagttttgtgttttttttggttggttgtggtggtaagggttggggtttgttatttttggttggggtggtttttgggtagtaggaagagagttggggtggtttggtgtttttgttttgtttgtttttggttattaagtaagttggtattgggggggagtttgttgtagttggagttggttgtagtttttggtttaagtattaggtggtgttgtttatttagatgggtttttttgtggtggtggttaaagagtttatgttttgggttggggataagggtggggtggttttttttgttgttattgttttggatttggtgggatttttattattatttttgtttgggttgttattttttgtgtttattgttattgttgggattttggtggttagtgagggtagatggaagagtatgaggaagagtttttttgggggtggtggtggtttgggagtttttagttaggttgtttgttttaaatagatttttttgttgtaattggattttattgaatagtagtagtagtagttgtaggttaaggaaaaggagattgaggagttgaagttagagagagatatggtatgggaggggttaatttgtatttgggttgaggagtgagttgtgtgtatgtttgggggaagggggttgtaggaggttaaggtatttttgggttaggggtaaaggaggttggttattggtaaaggagtattttaggtgttgggtttttgggagttaggtttatagatatgttgggttggagggaagggttaaagggtaattttttagggggagggggaggggttttaggtgttaaagggttaatttaaaatgatagttttagatgtgtgggaaagatgtttagtggaaaaagatgtga

SEQ ID NO: 286 - DNA, 4852 bp, Artificial Sequence
  chemically treated genomic DNA (Homo sapiens)
ttatgtttttttttattaaatgttttttttatatgtttggggttgttattttaaattaattttttggtatttgaaatttttttttttttttttgagaggttgttttttaatttttttttttaatttaatgtgtttgtgagtttggtttttagagatttagtgtttaagatatttttttgttggtggttaattttttttatttttaatttgggggtgttttaattttttatagttttttttttttgagtatgtgtataatttgttttttggtttgaatgtagattaattttttttgtattgtgtttttttttgattttagttttttgatttttttttttttggtttgtagttgttgttgttgttgtttgatgaggtttaattgtagtagaaggatttgtttgaggtaggtggtttgattggaggtttttgagttgttattatttttgagagggtttttttttatatttttttatttgtttttgttggttgttagggttttggtggtggtggtgggtgtgaggggtggtggtttgggtagaggtagtggtgggggttttgttgggtttgaggtggtggtagtgggggaggttgttttatttttgtttttagtttagggtgtaggttttttggttgttgttatgagagagtttgtttgaatgggtagtattgtttgatatttgggttgggggttgtagttggttttggttgtggtaggtttttttttaatgttggtttgtttggtggttgggggtggatagggtaagggtattgaattgttttagttttttttttgttgtttgggggttgttttggttgggagtaataagttttggtttttgttgttgtagttggttggggaaggtgtggggtttttgttttgggaggaggttagtgggggttttggttttttgagtttatggtgttgggggaggaagtgggttttggttgttttaggtttgtttttgggtttgtttagtgttgtagtttgtttgtagtttagttgttgtttaggattgttgttggtaggggttgtggttgttttgaatattgtggattttatggttatagtggtttggagtagtgttgggtattgaggtggaggagggggtggggaaggggtgaggtgtggggggttgaggattgaggggggggaggggagtttggtgggtttgttttagtagtgtggtagtaggtttttgttagtgtggtttttttggggtttgggtgttattttgttggtgtgtggagatgtggaggttgtggttgaggtttgttgttggtttatgggggttttgttgttgtttttgttgttgttgttgttgtttttgttttagaggtaggagtttgtatttagttgtttttgagtttatttttggagtttgttttggttttttttggtttggttgggtttgttttgtttttttattttgtatttttttttttttgttttggttttttgttttggagtttgttttaattgttttgagtttttatttttttttttttttttttaggagggggtggagggttgggtttgtttaaagtttttttattttgggagagggggtttgttgttttttttgggggtttttgtggtttggggttttttttttttatagttatttttggtgttttagtgtttttttttaaaaaaatggagttgtttgtagttgttattgttgtagttgttgttaattggaggatgtatgtgtggggaggggagtgggtgggagtgtattgggagttgagaggagggaggtgggttgtgttattgtgaaaggggttgttgttgttttgaggggggtagggaggggattgtgggggttgggggttggtgaggggaggttggggttgaggggtgaggattgaggagtgtgtggaggagtggggtgaaggtgggttgttgagggaggggtgagttgggggagggtttggagggggaagaagggtgagggtggttgtgggaagaaggggaaagtggaggttttttgggaaaaaagtgtgagagaatggagttgagaggaaagaaggaggatataggtggttaatgtgtggtttatgtgggagtgttttgagtgttttatgtttttggtttgtgttgggtggttttttttttgggtattttggtaatgtgtttggtttaagttggaggggttttgtggttttgtatgttttttggattagttaggatttaggtttttttttgagtttgtgggtgttttatgggggtagaagtttaatttttttatttttttttttttttagtagttttatgtgggtatgggagagaatgaagttttttgtttttaagggatttaaattagaaatggagggatttttggtttttagagggaggaaaatttatgatgtttgttgtttagggagttattgttattgtttttttgggatgaagtattgttagttattaatagtttttttttaatggttattttttagtttttttaaatgatttttagtatttttgggaggtttttgaaggattgaagtaaaggaaatttttgaagggatttagtttttgaaagggagtagggatatttagggtgttttgtgttgagtgtttttttttatttttttagttttatgtatgtgtgtttttatgtttaagtaattgagttaataagtttttagaattttttgtgaaaaaaatgttttttttttttgagatggatttttattttgttgtttaggttggagtgtaatggtgaaatttagtttattgtaatttttgtttttggggtttaagtgatttttttgttttagttttttgagtagttgggattatagttatgtgttattatgtttagttaattttgtatttttagtagagataggatttttttttggttaggttggtttggaatttttgattttaggtgatttgtttgttttggttttttaaagtggtgggattataggtgtgagttattgtgtttagttttgaaatagttttaattgtttgttttttttttttgtttgaggtgtgttttttaaaatttttatggagatggagaagattgatattttttggtttgatgtgaaaattttttattaaaattgtgtttgtgttttgtgggttgaaagtatgaaatattggaaattttaaataaatgtatgtgaatgtgttaagaagttaagagtttggtttttttttattagattgtatggttttagattagtaagggaagtattgagtttagggatattaagtaatggagtgagtagggatgagagggtatatagaatgtggtgatttttttttatgttaaggtttgtgtgtttgtggtattggggttttgttgtgtttttaaggttagagtatagtggtataattatggtttattgtagttttaatttttagggtttaagtgatttttttattttagttttttaagtagttgggataataggtttgggttgttatatttggttaattttttatttttttgtagagatgggtttttgtaatattagtttttgttgtttaggttggtattgaatttgtttaagtgatttttttatttgggtgttttaaagtgttgggattataggagtgagttattgtgtttagtttttagtgttaagattttttgtattatttttatgttgatagttttgtaatttatatttttttttggatttattttttaattttagaattatatatttaattgtttagtatatatatttagttggatgtttaataggtattttttttttttgaggtggagttttgttttgttgtttaggttggagtgttggagtgtagtggtatgattttggtttattgtgagttttttttgggtttatgttattttgttttagtttttttagtagttgggattataggtgtttgttattatgtttggttaattttttgtattttttagtagagatgtggttttattgtgttagttaggatggttttattttttgattttgtgatttgtttgttttggttttttagagtgttgggattataggtgtgaattattgtgtttggtttaggtattttaaatttatatttaaaaattaagtttttgaattttttttatttaaatatttaaatattatttttatagttttatttttttttttttttttttttgagatggagttttgttttgttgtttaggttggagtgtagtggtataattttagtttattgtaatttttttattttttgggtttaagtgatttttttgttttagtttttagagtagttgggattataggtatgtattattatgtttagttaatttttgtatttttagtagagatggggttttattatgttggttaggttggttttaaatttttgattttatgatttgtttattttagttatttaaagttgggattataggtgtaagttattgtgtttagtttagtttttttttttttgttattttattgttttttaaaatgtatgtttaaggttggatgttgtggtttgtgtttgttattttagtattttgggaggttgaggtgggtggattataaggttaggagattgagattattttggttaatatggtgaaattttgtttttattaaaaatataaaaaattagttaagtatggtggtgggtgtttgtagttttagttatttgggaggttgaggtaggagaatggtgtgaatttaggaggtagagtttgtagtgagttgagattgtgttattgtattttagtttggtgatagagtgagagtttgttttaaaaaaaaaaaaaaatttagttgagtttggtggtaggggtttgtagttttagttatttgggaggttgaggtaggagaatggggtgaatttgggaggtagagtttgtagttagttgag

SEQ ID NO: 287 - DNA, 2519 bp, Artificial Sequence
  chemically treated genomic DNA (Homo sapiens)
tatgtaatgttggattttaaattggttttaatttttaaaaagtttataggtatggatataaatttttagtttttgtggttgtggttgttttatgtattttttttagtggtggatataaatgttaatgtatttgttattatttaaggatataaaaatatagaaggtggtattttttgtttttttttttgaagattttttttagagttgttagatgaatgtttatgttatttttttttattaaaggtggatttagttaataggagattggattgtgattatagtgtgtttgtgtttagttttggggaaagttttatgttagtgagtggtttttggtttgttttgtagattggttaagtatgtggaggttgtgtggttttattattaatatttttgaaggataatagtttattaagttttattgaaagttttggatttgttgtggagtttgggttggtgggggatgaggttgagtaattttttttagaggtggttatgtggagaaggagtaatttttttttttttttttttttttttttgttattatttgtggtttagagaattgttgtttgttgttattgatatgtatagatagaatttaaagaaaggtaaagagttttgtttggtattggtgttgtgtgggttaaatttgtgtttgtggaggggtgtgtagagggtattgggtgttgggagtaggtggtgtagtattaggtgagtttgttatggtgatggtattattgtttagggtgttttggggtttggaaataaaatgtgttgttggggtagtgtaggggttggagagaattatttttgttttttttttgagtttttgtgggtgtatttttgatagttgatttattttttgtaaaaataaatttttaaatttagttgtttaatttgtttttttgggtgataaagggggggttgttaaagaagtggttaaatttttgtggttagtgaggggttgggggtgttgagggtattgagaggggaaggaggagggatgtgaggtttagtagtgggttttaggtgaggttggatttggaggaagtggaggttttttgggaatgtggagttttgggtgtaggagtgggaggatggaggtgtttggttgttgatgggtatggggtgatgggtggggggttgtgtagggtttgagggagtttggggagggttgtttgggggtttttgaaggtgtttgggtagggtgttggtggttttaggttgataatggagggggtgtggagtagttgggtggaggttagggatttgagtttgggggtgggttgtgttggggaaggttaggttggggatgttgggtggtggggtgagggttgggggttgttgtgtggatatttgggtgttgtgggtgggtgtgtgttttggggttggtgtggaagagggtgtgaggttgggtatttttttttggttttttttttggggtgtttggtgttgatgtgtgttgtgtttttattgggaaatggtggtttggttgtggtttgtttgggtagtttggtttttgttttgtgtgggaaaaaataataataataaaaatattgaaaaagggaataaaagtaaattggttgtggtgtaggaaagggttttgttgggtgttggatgttgtgtgtattgtttgtggggtgtggtggttggggattagttttgttttttttggtttttagtttttagttttggtgtattttagttttagtttggttagttttttggattgtttgtgggtgtttttttttgtttttttttgggggggtgtttttagtttttgttttttttgttttttataataatggttaaaggggtattggttttttaagggttaaatgagttttttttaggagttttttgttgtgtgtagtggattattgtgggtttgattgaggtttggtttttgttagggttttttggtaatggttttggatgagtgaagggatgaaaggtgtgagaagaaatgggttgagaaattaaagtgtggggttttgagtgtttgaggggatgtgatgggaattgtggttttgttgttttgattttaagggtagttattttgttatagttatgttggaattgaggtgtttttttagtttttgtttattttagaggaatttaaaataagggtttagttttaagttttatagattttaggattttttaggggttattagtttattgtggtaaatggtttttttattttgtttatttgtgtttgttttgaaatttaattgttattttattgggttgtatagttgttattgaaatggtttaataggtgagagaaaaagaaaatattattaagagtgagaatgtgtttttgtgtgtgttgttttgaattataaattaagttatatataatttttaatttgttttaatatattttttatttttaaattaaatgttaagagttttaagatttggaaatatattggtgatttttagaattgttttagtttaaaattatatataaataaatagaggtattgtttggtggaaaagtttattttgagttgtat

SEQ ID NO: 288 - DNA, 2519 bp, Artificial Sequence
  chemically treated genomic DNA (Homo sapiens)
atgtgatttaagataaatttttttgttgggtagtgtttttatttatttatatgtaattttaggttaaaataattttaaaaattattagtatgtttttaaattttggagtttttaatatttagtttgaaaataaaaagtgtgttaaaatggattgagaattatgtgtagtttagtttgtggtttaaaataatatatatgaagatatgtttttgtttttaataatgtttttttttttttttatttattgaattgttttagtagtaattgtgtagtttagtgaggtgataattggattttaaaataaatataaatgagtaaagtgaggaaattatttgttgtggtggattaatggtttttaggggattttggggtttgtggggtttagaattgggtttttgttttgaatttttttgaggtggatagaagttggaaggatattttagttttagtgtggttgtgatagggtaattgtttttaaaattagggtagtggagttatggtttttattgtgtttttttaaatatttagggttttgtattttggttttttagtttatttttttttgtgttttttatttttttatttatttagggttgttgttaaaaaattttggtaaggattaggttttagttaggtttatggtggtttattgtatgtgatgggaaatttttggaggaagtttgtttggtttttggggaattaatgtttttttggttattgttgtaaggaataaagagggtaagaattgagggtgtttttttaaggaaaggtgggggaggatatttatgggtgatttggggggttggttgggttggggttgaggtgtgttggggttggaggttgggagttgggggaggtagggttggtttttaattgttgtgttttgtgagtgatatgtatggtgtttggtgtttggtagagtttttttttgtgttgtagttagtttatttttatttttttttttgatatttttattattattatttttttttgtgtaaagtgggagttagattgtttaggtgagttatggttgggttgttattttttggtgaaagtgtagtgtgtgttggtattgggtgttttggaaagggaattgaaggggagtgtttggttttgtgtttttttttgtgttggttttggggtgtatgtttgtttgtggtgtttgggtgtttgtgtagtaatttttagtttttgttttgttatttggtgtttttgatttgattttttttggtgtggtttgtttttggatttgggtttttaatttttgtttggttgttttgtgttttttttattgttagtttggagttgttggtgttttgtttgggtatttttagaggtttttgagtggttttttttgggtttttttgggttttgtgtagttttttatttattgttttgtgtttattggtggttgggtgtttttgtttttttgtttttgtgtttgaaattttgtatttttaggagatttttgttttttttgggtttagttttgtttggggtttgttgttgaattttgtattttttttttttttttttttagtatttttgatgtttttggttttttgttggttgtaggaatttgattatttttttagtagttttttttttattgtttaaggaagtaagttgggtagttggatttaagaatttgtttttgtagagggtgggttggttattgagggtgtgtttgtaggggtttgggggagaggtagaggtggttttttttggtttttgtattgttttggtggtgtgttttgtttttagattttggagtattttaaataataatgttattgttatggtgggtttatttggtgttgtgttgtttgtttttggtgtttggtgttttttgtgtgtttttttatgggtgtaggtttggtttatgtggtgttggtgttgggtaggattttttgtttttttttgggttttatttgtgtgtgttaatggtggtaagtggtagttttttgggttgtggatagtagtggggggaggaggaggagggagaagggattgttttttttttatataattatttttaggaggagttgtttagttttattttttgttagtttaggttttgtgatgggtttggggtttttggtggggtttgatgagttattgttttttaggagtattaatggtgaaattgtgtggtttttgtgtatttggttgatttgtgagatgagttgagggttatttgttaatatgaggttttttttagaattgggtataaatgtgttatggttgtgatttagttttttgttagttggatttatttttggtgggagaaggtggtgtgggtgtttatttggtagttttggggagagtttttgaaggggaaagtgaaaaatgttattttttatatttttgtgtttttaaataataataagtatattaatgtttgtgtttattattgggaagagtgtatagggtggttatagttatgagagttgagaatttatatttgtgtttgtaggttttttagaaattaagattgatttagaatttagtgttgtata

SEQ ID NO: 289 - DNA, 9783 bp, Artificial Sequence
  chemically treated genomic DNA (Homo sapiens)
ggttatattagatttttttttaattgtttttttgaatttttagatgatttagagtggttggttgattttgttggtttattttatatttagggaaggaatttgttttggagatattaagagatattgtatttttaattttaaaattagagtgagggtgggatttggttttgggattttagttttaaattttaggatatttttttttggtttgagtatgaagaaggaggatttttaattttattttttttttttttttttttttttatatatatatatatatatatatatatatatatattatatatatatatatatatatatatatatatatatatatatatatatatatatatatatatatatatatatatagagttggatttttttttattttttttatttttaatataagtgggttttaggaattgtttagggtggtgtttagattttgttgagtagtggtaggttttaatggttatattttgtttttatttttgttatattttttttttggtttggaggaatttttattttattttattttaggttttttgtggttgtttattttgggggttggggtgtttgagttgaagtttttttgttttttgtttggtggggtaggttttgggaagttgggaggagaagggaaggggttttgatttggattttaggaggttagagtttttgttggtaggtttgggtttttttgttgtagtttggggaggggttgatgtggtttgattattgtttagtttggatgttgattttgtttggagggaatggggtttatgtttaggttgaagtttttttttgtatgggttttgatttttgggttagtgaggaagggaaagtgtttttttggggatgagtttttaagatgttttattgtttgtagttttggtttagggtattttttgttttgttgtttttagttgtgtggttggtgttggaggtttagattgattttagggttttgttttgtttttttttagtgttgtggtggggagggtgggtttggtagggggagggttggttgggggtggtttttggtttggtttgttttggttttgtgtagggttgtagtgtggtggttttttttgtagaaaaaaaattgggggttaggggtgtttatttttttaggttggggagagttatggggagatttttggattgtggaggagttgggtgagtggggggagtatgatttgggtggatttagattttgtttagtttttaattttttaggggaggattggtgttgggaaagttaagaggtgtttggggtggggttaggaagggttgttgttgtttttttgtggttaagtggttatttgtttttgttgtatttgggattttgtgggaagtgggattgggaaagggtatttgttgggaggttttagggtttggtgtgggtgtgttggttggggggagatgtttatttttttgtttttaggattgtatagtttaatgttattttttaaatttgaagattttttagagttgtttagatttagattattgtttttttttataatttgtttttttttttgggtttggaatttttaggagtttaatttttatttattttttaaagggtgtgtttagaaatgtttttggattttagttgtgaattttgtttttatttttaggtttgatttggtgtataggatatttatttatatgtgtattttttttttttgtaagggagttgaggaggtgggagtagaatgaggatgtttattaatattttattggtttgtgtttgggatattatatagtttaatttttttaatatttattatagatttttggggaaaatatatttatttttttttgtttatagagaagttgaggtttagagaaattaagtggtttatataattgtttttgatttgtgatagtaagaatttatatagttgggtttgtttggttttaaattggtggtttggttttgttattttatgggtttttttagtttgtttttttttttgttgtttagtagagtgagtggtatataataggttgttaataaatatttgatgaatgaatgaatgttaggagttatatagattttaaatatttgaagtgtaatttagatatttgataaatgtgaaaataggtttgtagtagtttggttttaggttttttaattgatttaatgaatattttttgagggtgaattgagagttatgtttggaagatttatttttgtttttaaataatttagagtttaaatgaggaatgtaattttaagatagttaatatttattgaatttatattatatggatttgggtttatatatattaattataagaattttatgaggtagttatttttattttattgagaagtaaattgaggtttagagaggttatagagttagtgttgggtttgatattagaatttaaatagttgaattttagagtttttgtttttaatttttattttttattgatttttaatgtagatagttataatattggaggttattgttgtagtgtgggtatgtgtgggttgtgtgatatttagttttgaataataggtgaagtttttaagataaggtgatgtgtagatttttttaattttaatttttttttgagataaggtttttgttgtttaagtgtgtagtggtaagattttagtttattgtagttttaattttttaggttttaatgatttttttattttagtttttttagtagttgagattataggtgtgtattattatatttaatttttgtattttttgtatagatgaggttttgttatattgtttaggttggtgaggggttttttttaattattttgtttatttttatttttgttttttttaatttattttgggtttaatttgttgttttttttttagttttttaaggtggaaatagattattgatttgagatttttatttttttttattataagtaatatttttaatttttttggatgtttaattgttttttataggtatttattattatatttagttaattttttatttttttgtagagatggggttttattattgtttagggtggttttaaatttttgggtttagtagtttttttatttttgttttttaaagtgttgggattataggtgtgaattattgtgtttagtagtagattttgaataagttggagttattaaaagtttatagttatgtaaattttaggaagttggtggtggtggtaaaaaatgaagttggagaaggaagtagtggttggattatgaaggtttttatatgttatgtataggagttgagtgttgattttgttttaggtgtaataaggagttattaaatttaggaggttaatatagtaaaaggtggtggtgattgaaggtggggagagatggagataagtagagaaatatttttaaaggtttatagttaataatatttagtgattaattattttgatgagaaagaaatgaaagttaagggtgattaattttaagatttttaattggagtagtagagttggtgtttattgaggggatatattaggagaaggaatatgttatggagggtagttgtgaatttagtttgaggtatttgaattgaagtgttagtaggttatttaggagatatttgggagatgattggtatgtgtgggtttaaagtttaggaagggtttgggtagatgggtgaggttatagaagtggatgatgatatttatagtaaatgtgtggagtggaaagagtgggggtggaataaagaatttgggggatattatatttttagaattgttttggtgttttttttattattttatagagttttttttttattttttagtttttagttaaagtaaatatagatatatatttttatttattttgtttatttgttaatagttgtaattttggatatagtggatattttttttttagttaagttgttattaaagaagggttagggagataattttagaatttgggttgtgagaggagtaagtatggagaggttagtgggagggatggtgtttagttttttaggagtaattgtttggtttttttagggggatgatgaagatagagatgttatttttggaatttagtttgttgttggggagatgttagttatggttttggggggtattttgggtttttaggattagagtttgggttagagttgtatatttgttaggagtatatatgtatatttatgtattaatatgtatgtgggaagatagatatataggtttatatgtggggttttaagtattgtttttttttgattttttttttattaatgttatttttttattattatgttatgtagtttttatttgttgtggttattaggtttataggttgatagtattttgtttatagtggtagttattttatagttagtagtgatattttataggttatttgtttttaggattagtatattatttgggtagtgtttatattgtgttaggttatatatttgtatttggtgggagaaaagggtagagaggattgaggtgtggggtttgttggatagggagtttggagataaagggattgtagatgaaagttggtttgagatttttagagaaggtaaggtgtggtttaaggggtttattttagggaagtaggagagaaagggtttgatgggtagggtggaattgtagattttaaggttgtggttttttaagttttgggttattttaatggtggttattatttgagtttgaaagaaatgaggagggagtgttattgtagttttttgttagattttttgaaattaaagattttttttatttttatttttaggtagaatttttatttttttagataagttgtgataggtttttttttttttttttatttttattatggagtttatttttttgttttttttatagattagaggaaatttgagattttttagtttgatttttttgtaggttttggggaggggggagtagaggaggtattatttaggtattaaagttttttttttttaggagttgtatatttttatataaattttttagaagggttatatttttttaatttttagtttttagtttttattttgttgtgggtgagggattggttgtgttgttatgggaatgggttttagttttgagggaagtgttattagttggttatgttttggttttggtataatattttttgttttagttttttgggtagaattttgtgggggaatttaaggtgggtgaatttattgtttagtagttttggttttaggaagttttggagttggggatgattagaatagagagttagggggtattatgtttatagtatatggtggtatatagatgatgttgattatagtagatttttaaatagagtttattatgtgttatatgttattttaatattagtaaatattaatttatttattttttataatagtttttaaggtaggaattattgatgtatagagaggttaagggagggaattgttttggttatataattagtaaagtatttagattaggatgtattttgggtttttagttttatagttatatgtgtttaggtattaagttggattgttttttaggggtttttgttgttttttttttttattttagtttttattttttgttttagttggggttatagtgggagtattggattagtttagtgttgtagtttttttgttgtaattttttattggtttagttttgtattttatagtttatatagtggtttttttagtaaagtgttttttgtgtttgtggtgggggtgtgagagtttttagggttatggggtgtagggaggtataagatttgataaagaatgggggtagggaatttggtttttatttataagtagttgaagatgttggtgtttagtttttggggtaaatttttgggatattggaatgattttattattttggataatgatggttttgtttaaagaaagaaaaggaattgggatttggttttttttagatttatttatgaaaaattttagaaagattaggttttttttataatgattttttagattttttatttagatttttatatttgtttttgattttatttaatggatattttaggttattttttatgtttgttattttttttgattttttttaattttgatttttaatttttgttattttatttttttgtatttttttaatttagagagtgtggttttttgttgttattttggagtttttttttttatatttgttattgtttgtattggttatgtatattttgtttagtaggtagattataattagtgtatagtagtttttttttatttggtggttatgttgtttttgggttatttgtttattttgttatataaggaagggttagaggtgggtagaaggagaggttttattatatagttattttttttttattttttttatttgtagaaattaattggtttagttaggttatattggaagataggagggaagattggggtgtaattgtttttttttttttttttttgaattaagttttgtttaggtttttaaaggtgttgtgggtttttagggtaattttttttggtttttatatagagttggttagagtggttgtttagtaggtttttggtttaggttatttatttattatgagttggaaggtatttttaatggtttttattattaggtttttgtggtttatttttttttgtgaagattagtaggattgagggttaagtaagtgagagggattggaggaatttggggtttttggagtggttgggaggtagaggggtggtggtgaagggttttgaagtatttttattaggttttttagttgtttttggatatggtgatgtaggagttgtgaggttattttagtagttttgttttttgtatgtttattaaataggttttagtagtagaagtagagtttttggtggaggaaaagttggaggtgagttttgtttgtgtgtgtgtgtgtgtgtgtgtgtgtgtgtgttatgtaaggtgaataataagattttgggtatttatataaatatttgagaggttagtgtttgttattgaaggtaaattaggtttatttatataaggttttgtatgtgttaagagaaaggaaaggtttaaaaatttaaatttagaggataatagatttaaaatttagtattggtaattaaattatttataaatatgtgagtttttatattttaggtgggaaagtaatatttatgtttatatggtagaatttaattgatgaatattaggtaaaggttttgtgttagaaggtagatagttagtgagtttattaggttttttgtatggtttagatttaaaattagaggtttgagtttttggggagaggtgttattgtgtttttgggaaaggggatgggttttatttggttttggttaggttttttaggtatttttgtaatatttttttgattttttatatatattattttatagtaagtttggtttttattgtgttgatttttgttagtattgatgattttgttaggttagaatgattatattaggttggatattagattaggttttggaataatttttattttagatatatattgttttttgtgtttgttggttaagttgagaaaggttatagttatttgggatttaggttagagggaggaggagaagggagggttggtaaggtgtaatgagtattgtttgggtggttagttttattattttatagaaaggttattaggattttttggttaattgttatgttttttgtttgttttattttttttatttttggtaaaaaaaaaagaaaaaagaaaaaggtatttttagtggtgtttttgggggaggggttagttggtagtagaagttttatttttttgttagttagattttatattttatttttaattattattaatttttttagtgttttgtttttagtattttatttttatgggtatatttatttttattttaaaattatttagtgaaagtttttgttgttttaataatgaggaagttttttagtttagattgggaaagaggaattgaaatagagtagaagtgaaagtttatttggattgggtaggagttatatatttataaattttttttatataggaggttaagggaggtggtggtgggtttatgggttattagttattttttttagtgaattgagtgtttttattttttttggtgttttgtgtttttggtagatgtatttaaaatatatatagtttgggggttagttggttgttttgggtagggggtttgtttttttgttaggttagtatgagttggtaggttgaagggtatttaaatgggatttttttttattttgggtgtttttttttttgtttttggggaagttggtggttttttggtgttgtgggttatttttgggtgtggagggggaggggaattatggtaagagggatagggaattggggtgttggagttgggaagtgggtgagtgagtttttttaattgttatgttttttattaaaaagaattttgtttttttgtgaaatttttttttttttagtttttaagttgttgggttgtgatggggaattggttaatttattttttgttgggttttttgttttttgggttttggggtagaatagggttttgaggtggtgtgggtgagggtagttaatgagtgggaaggatgtgaagaaggtgatataggttgttttttattggaaaatgggttgggagggggtgtggtttgaagattagaggatagtaaaggtttatggaaaagggagtttttggtttggatgtggtgtggggaatgtgttttagtgttggggatgtggagttggggagaggggtgggagttttattttggtttgggtgttttagggggtgtttatttggtgtagtttgtgttttagggtaggtggtggtttgtgtttggggggttttgtatagtttggtttgtgtggttattggtgtgttgtagttttttggggtttagttgtaaaaaggttggtttggagaagtttgtttgagttttaatagtttttgtgggtgttgtgtttttgtttttaatttttgtgggagggtttttgggtgtttttggagtggtggtgggtggtgttgaggtggtgttgggtaggtttggggatttggggtgtggaggtggagtgtttttggagtttattaggtgtgttatggttgagtgtatttggtttagtatgttgtttttttgttttgtttttggttgtggttttgtttttgtttaggttttgtttttatggttttgtgtgggtggtgtttgtgttagttggtttttttttgttattggtttttggttagttgggtgggttttgggtgaaatttgtttttgttttgggttattttaggaattggtttatgggtttttggtttttgttttgttttattttggtttggttttgtttttgttttttaggggtaggttttgttgttgtgagaagggggtggagagaaggaaattttattttagttgtgtgttagattagatatagttagaatgtttttattgtgatgggggttgagggataagggggtgtggtttttttgtttttggtttggtgtggttagttagtttagagagttatggagttaatgattttagagtaaaataggtgtttgggagttgttgggtatgaggtgttaggtgtgatattatttttggatggggttgttggagtgagagtgggtaagttggtattgggtggggttgtgggattaatgatgtaggttgtagttgattattttggaattaggagttggggtagatttttgggtttttgatgtgttgttttttgtgaagattatttttagatttgggagagtggttgt

SEQ ID NO: 290 - DNA, 9783 bp, Artificial Sequence
  chemically treated genomic DNA (Homo sapiens)
gtaattgtttttttagatttagaggtggtttttatggggaatagtgtattaggagtttaggaatttattttggtttttgattttggggtggttggttgtagtttgtgttattaattttgtaattttatttggtattagtttgtttgtttttgttttagtagttttatttagaggtggtgttatatttggtgttttatatttagtggtttttaagtgtttgttttgttttgaggttattagttttatggttttttgggttggttggttatattgaattgagagtgaggagattgtatttttttgttttttagtttttgttataatggagatattttagttgtgtttaatttagtgtatggttgaaataaagtttttttttttttgttttttttttatagtaatagaatttatttttaagaaatggaggtggggttaagttggaatggggtggggtagaggttggggatttgtgggttggtttttggggtggtttagagtaagggtaagttttgtttgggatttgtttagttggttgggagttagtagtagggaagggttggttggtgtgagtattgtttatgtggagttatgggggtggggtttgggtgggggtggggttgtggttgagggtggggtagggaggtagtatgttaaattgggtgtgtttggttgtggtgtatttggtgagttttgggggtgttttgtttttgtgttttaaatttttggatttgtttaatgttgttttggtgttgtttgttgttgttttagaagtgtttaggagtttttttgtgaaggttgggagtgggagtgtgatgtttgtgaaggttgttgaggtttgagtgagtttttttagattgatttttttgtagttgagttttggggggttgtgatgtgttgatgattatgtgggttgggttgtgtaaagttttttggatatgggttgttgtttgttttggagtataggttatgttgagtgagtgttttttggggtatttaaattaggatggggtttttatttttttttttagttttgtatttttggtgttaggatgtgttttttatgttgtgtttgggttaggagtttttttttttgtggatttttgttattttttggtttttgggttgtatttttttttaatttattttttagtggggggtagtttgtgttattttttttatgttttttttgtttattgattgtttttgtttatgttgttttaggattttgttttgttttagagtttggagggtggagagtttggtgaaggatgagttggttagttttttgttgtggtttggtagtttaaaggttaagggaaaaggggttttatgaaggagtggggttttttttaataggggatatagtggttgggaagatttgtttatttgttttttggttttagtgttttagttttttgttttttttattgtagtttttttttttttttatatttagaaatagtttgtgatattaggaggttgttagtttttttaggagtggggagggggatgtttggggtagaggagggttttatttagatgttttttagtttgttaatttgtgttggtttggtaaagaagtggattttttgtttggagtggttggttggtttttgggttgtgtgtattttaaatgtatttgttgggaatgtagagtattgagggagatgggggtgtttagtttgttgaggaaggtggttggtggtttatggatttattattattttttttagttttttgtgtgggaggagtttatgggtatgtggtttttgtttagtttaggtgggtttttatttttattttattttagttttttttttttgatttgggttggagagtttttttattgttaaggtagtagaaatttttgttggatggttttaggataagggtgggtgtgtttatgaggatgaggtgttggggataaggtattgggagagttgatagtggttgagggtgggatgtagggtttagttagtagggaagtaaaatttttgttattaattagttttttttttagaagtattattaggaatgtttttttttttttttttttttttttgttagggatgggggaagtgaggtaggtaggggatatagtggttggttagaaggttttggtggtttttttgtgaagtggtagggttggttatttaaatagtatttattatattttgttagtttttttttttttttttttttttggtttggattttaggtggttgtgattttttttagtttggttagtgggtgtaggagatggtgtgtgtttaaggtgggggttattttaggatttggtttggtgtttaatttgatgtggttattttggtttggtagggttattaatgttggtaagagttggtataatgaggattaggtttgttgtgaagtggtgtatgtggaaggttggaggagtgttataggagtatttagggagtttagttgaggttaggtaagatttatttttttttttagagatatagtgatatttttttttagggatttaggtttttggttttaaatttgagttatgtggaagatttgatgaatttattggttatttattttttggtatagaatttttatttggtatttattagttagattttattatgtaagtatgaatgttatttttttatttaaaatgtagaggtttatatatttatggatgatttaattgttagtgttgagttttggatttgttattttttgagtttgggtttttgagtttttttttttttttgatatatatgaagttttatgtgaataaatttaatttgtttttagtagtaaatattgattttttagatgtttgtatggatgtttagagttttgttatttattttgtataatatatatatatatatatatatatatatatataaataaaatttatttttaattttttttttattagggattttgtttttattattggggtttatttgatgggtatgtagggggtggagttgttgaaatggttttatggtttttgtattgttatatttgagagtagttaaaggatttggtagagatattttaggattttttgttattatttttttgttttttaattattttggggattttagatttttttgattttttttatttgtttggtttttagttttgttggtttttatagaaggaagtgagttatgagagtttggtagtgggggttgttgagaatgttttttagtttatggtgagtgggtgatttgggttaagagtttgttaggtaattattttggttaattttgtgtggaagttagagggggttattttgagaatttataatatttttgagagtttgagtagagtttggtttagaggggagggagaaggggtagttatattttagtttttttttttgttttttagtgtagtttggttgggttagttgatttttatgggtggagggggtagggggagggtgattgtgtgatggaatttttttttttatttatttttgatttttttttatgtggtaggatgagtagatggtttgggagtggtgtggttattaagtggaggggggttgttgtgtattggttgtgatttatttgttaggtaaggtgtatgtggttaatgtaggtgatagtaggtatgggggagggggttttaaggtggtgatagagggttatattttttgagttgggggaatataggagagtaaggtggtaggggttaaaaattaagattggagggagttaagaggggtgatagatataaggagtggtttgaaatatttattgggtggggttaggggtagatatgggggtttgggtaagagatttgaaaggttattatggagagggtttggtttttttggaattttttatgagtgggtttgaagagaattaggttttaattttttttttttttttgggtagggttattattgtttggaatggtgaaattattttaatgttttgggagtttattttggagattgagtgttagtgtttttagttgtttgtaagtaggaattaaattttttatttttattttttgttgggttttgtgtttttttgtattttatggttttgagaatttttatatttttattataggtatagaaagtattttattgggaaggttgttgtgtggattatggagtgtggggttgagttggtgggaggttgtagtagggaggttgtagtattgggttggtttagtgtttttattgtggttttagttgaggtaggaagtagagattgaggtgggggaaggaaatagtaaaggtttttgaaaggtagtttggtttagtgtttaaatgtatgtggttgtggagttggaagtttgggatgtattttggtttgagtgttttgttaattgtgtgattggagtagtttttttttttaatttttttgtgtattaatagtttttgttttaagggttgttgtgaggagtaaatgagttaatatttgttaatattagaataatgtgtggtatatggtaaattttgtttaagggtttgttgtagttaatgttatttgtgtgttattgtgtgttgtgagtataatgttttttggttttttgttttgattatttttaattttagggttttttgaaattagagttgttaggtagtgaatttatttattttgagtttttttgtagagttttgtttaaggagttggggtagaggatgttgtattgggattagaatatgattggttggtaatattttttttagagttggggtttgtttttatggtaatataattagttttttgtttgtagtaaggtggaagttggaggttgggagttgggaggatgtggtttttttaaggggtttgtgtgagggtatgtagtttttaggggagaggggttttgatgtttgggtgatgttttttttatttttttttttttagggtttataaaaagattgagttggaggattttaggttttttttggtttgtggggagggtaaaaaggtaaattttatggtagaggtgggagaggggaggaggatttattataatttgtttagggaggtggaggttttatttgagggtaggggtggaagggatttttggttttagagaatttagtagaggattatagtggtattttttttttattttttttaggtttgggtgatggttattattggggtgatttgaggtttgggagattatagttttaaggtttgtagttttattttgtttattaagtttttttttttttgtttttttgaggtgagttttttaaattatattttgttttttttgggagttttaggttagtttttatttgtagtttttttatttttaagttttttgtttagtaaattttatattttaattttttttgttttttttttttattaggtatgagtgtatgatttgatataatatgagtattgtttagatgatgtgttagttttgggaatagatggtttgtgggatgttattattgattgtgaggtagttgttattgtggatagggtgttgttggtttatgagtttaatgattatagtaggtaggggttgtatggtatggtggtaaggggatggtattggtgaaagaagggttaaagggaagtaatgtttgggattttatatgtgggtttgtgtatttgtttttttatatatatgttggtatatgaatgtgtatgtgtgtttttggtaggtatatagttttggtttaagttttggttttgggggtttggggtattttttgagattgtggttggtgtttttttaataataagttgggttttggggatgatatttttgtttttgttatttttttgggagggttaggtagttatttttgaggggttgaatattattttttttattagtttttttatatttattttttttatagtttaaattttgaagttgtttttttgatttttttttagtggtaatttaattgaagaagggatgtttgttatatttaaaattatagttattggtaaataaatgagatggataaaggtgtgtgtttgtatttgttttgattagaaattgaaagataagaagaaagttttgtggggtggtggaaagagtattagaatagttttagaaatgtggtgttttttaggttttttattttatttttattttttttattttatgtatttgttgtgagtgttattatttatttttgtggttttatttatttgtttagattttttttgagttttagatttatatatattagttattttttgaatgttttttggatagtttgttggtattttaatttaaatattttaaattaaatttatgattgttttttatagtatgtttttttttttggtatatttttttaatgggtattagttttgttgttttagttagaaattttggagttggttatttttggtttttattttttttttattaaggtaattgattattaagtattgttgattatagatttttaaaagtatttttttatttatttttatttttttttgtttttagttattattattttttattatattggttttttaaatttagtggttttttattgtgtttagaataaaattaatatttaatttttgtgtatggtatataaggatttttatgatttagttattgtttttttttttagttttattttttattattattattaattttttggggtttgtataattgtgggtttttagtagttttaatttatttaaaatttattgttggatatggtggtttatgtttgtaattttaatattttgggaggtagaggtgagaggattgttaagtttaggagtttaagattattttgggtaatagtgagattttatttttataaaaaaataaaaaattagttgaatgtagtggtgagtgtttgtgggaagtagttaagtatttaaggaaattaagagtattgtttatagtagaaaagaataaagattttaaattagtgatttgtttttattttaagaggttagaaaaagaatagtaaattaaatttaaagtaagttaagggaagtaaaaataaagatgagtaaaataattagaaaaggttttttattagtttgggtaatatagtaagattttatttgtataaaaaatataaaaattaggtgtgatggtatatgtttgtagttttagttgttggggaagttgaagtgggaaaattattggagtttggaaagttgaggttgtagtgagttgagattttgttattgtatatttaggtaatagagattttgttttaaaaaaaaattaaaattaaaaaaatttatatattattttattttgagaattttatttgttgtttaggattgggtattgtatagtttatatatgtttatattatagtaatgatttttggtattgtaattgtttatattaggagttagtagggagtaggaattaagaataggggttttagagtttagttgtttgggttttagtgttagatttagtattagttttgtaatttttttgaattttaatttgttttttagtaaaatggagatagttattttatgggatttttgtagttaatgtatgtggatttaggtttatgtaatatggatttaataaatgttagttattttgaaattgtattttttatttagattttaagttgtttgaaggtagaaatggattttttgaatatagtttttagtttatttttgagaaatgtttattgagttagttaagaggtttggggttaaattgttgtggatttgtttttatatttgttaaatgtttggattgtattttagatatttaaagtttgtatgatttttaatatttatttatttattaaatatttgttgataatttattatgtgttatttattttgttagataatgggggaagggataggttggaggagtttgtgaggtagtagggttagattattagtttggagttagataggtttggttgtgtgaatttttgttgttataagttaaaaatagttgtgtaagttatttgatttttttgaattttagtttttttatgggtaaaaggggatgggtatattttttttagagatttgtgatgaatattgaaagggttaagttgtgtagtgttttaagtataagttaatgaaatgttggtggatgtttttattttatttttatttttttagtttttttatagggaaaggagatatgtgtgtaggtaaatattttatgtgttaagttagatttaggagtgggaatagaatttatagttgggatttagaagtatttttaggtgtattttttgaggagtaggtaggaattggatttttggaaattttaggtttagggaagaaagtgaattgtgaggaggaatggtggtttgggtttgaatggttttgagaggtttttaagtttgggggatgatgttgggttgtatgattttaggaataagagggtggatatttttttttaattaatatatttgtgttgggttttgggattttttggtggatatttttttttagttttgttttttgtgaggttttaggtgtagtaggagtgggtggttgtttggttataggagggtagtagtggttttttttgattttattttgagtattttttaatttttttgatgttggtttttttttaggggattgaaggttgggtagagtttgagtttatttgggttgtgttttttttgtttgtttggtttttttgtagtttaggaatttttttgtggttttttttgatttggaggggtggatgtttttggtttttagttttttttttgtggagggggttgttgtgttgtggttttgtgtggggttggggtgggttgagttaagggttgtttttggttgattttttttttgttgggtttgttttttttgttgtggtgttggaggagggtggggtggggttttggggttagtttgagtttttggtattggttgtgtagttggaggtggtggagtggaaggtattttgggttggggttgtgggtggtggggtgttttgggaatttgtttttaggagagtatttttttttttttgttggtttggagattggggtttgtgtgaggaggggttttggtttgggtgtggattttgttttttttaagtggagttggtatttgggttgggtggtggttggattgtgttggtttttttttgggttgtagtgagggggtttggatttgttggtaggggttttggttttttgaggtttgagttggagtttttttttttttttttttagttttttggaatttgttttgttgggtgaggggtgagggaattttaatttagatgttttagtttttagggtgggtggttgtaggggatttagagtgggatggggtgggaatttttttaggttaggagggaggtatggtgggaataggggtgggatgtgattattggggtttgttattgtttggtagggtttggatgttgttttggatggtttttggagtttgtttgtgttgaggataagggagatggggaaggatttaattttgtgtgtgtgtgtgtgtgtgtgtgtgtgtgtgtgtgtgtgtgtgtgtgtgtgtgtgtgtgtgtgtgtgtgtgtggtgtgtgtgtgtgtgtgtgtgtgtgtgtgtgtgtagagagagagagagagagagaaaatgagattgagaattttttttttttatatttgaattaagaaagagtattttggggtttgggattgggattttgaggttgagttttgtttttattttggttttaaagttgagaatgtagtattttttggtatttttagaatggattttttttttaggtgtagggtgggttggtaaagttaattggttgttttggattatttgggaatttaagagagtgattggagagaggtttgatgtagtt

SEQ ID NO: 291 - DNA, 13537 bp, Artificial Sequence
  chemically treated genomic DNA (Homo sapiens)
tgtataattattgttaatttggtttttagtagaggtttgtgggttagggagtgtattgatttgtattgttaaaggaattttttgttttttttagtgttagttgaagagttttttgtagttatttttttattttgagagaagagaaataagaggagatgaatttttggtttttttttatggggtgtatagattagtgataatgttagttttataatttggatttatttgtttgttttttaattattgttatttttttaagtataaagtttgtgtttataattagatattttttatatgttatattggtaagtttattttattattttatagagggatggtgattttttttagtgttttatattgattgtggttttttatttgttgattgattgatttataaatttgttttttatttatttgtttgtttattgaaggtaaatttgttattgggaatatagtagttttttaataattatttaatgtatggttattttttttaggatttagaatattaaagggatgtgttttttttttttaaattatttgtttgtgttttttttagttgggtgttttagtttttattttggtttggttattattttattttgtttttttgtggtttttaggttttgggttgggattttagtttttgtttgtaggtgtggtttagagggtgtgatatgtgttggagtggggtagtggaggaggggatagggatgtggtagttatatttgtatttttttttttttttgggtatttttgagggtttttttgtttttagttttttgagtttttgaagttttttatgtggtaagagtgagttgtaggaataagtggggaattttggttgtggtttttttttttgttttataaaaaagaaattgatttttgtttggagtttgtgaaaagtggggtttggggtttagttaatggggtgttttgtggtgtgggttgagtggagttagtgtgaattgtttagttgtggttttaattaatttgttttttgtgtggtttgtttggttgtttttgttgtagttgtattagtggtttattgtttggttttgttgggttgtgggatttattttttttaaatagttggttttgtttagggtagtttgagtggaagttttttattgataatttgttttaaatagatagatttgttagaagtgatttttgggaaggaagtaaaaagttattggtttgaaggttgggtttaaaatagggattttgtgttttatttgtggttgtgttgtttttttgtgtttttggttttgtagttttgaagttttgtgggggtttagattattgtatttgttgagttagatattttgtggatttgatttttgttttatttatttgtaaaatggagtagttgggtgttggtaagttgtaagtttaagagttttggttttattagtgtgtatgatgtttattttttttttttttttttatattttttttaaaaattgtaagttagaaaatttggttaggtttttgtgatggtgagaaatggttttgaaggttggttggttgttgtaatgtggtttggattgtgtatgtgttgttttgttattgttttttggtttttttttaataaagatgttaattgtgttaaattataggtggtgtttttgtaagattagttattgtttttttataagttaagatataaaatgttttgtattgaatggtttatgatttggagtgtttaatttgggagttgagttgttagatttttttttttttatttattagagttattttttttttaaatgattttatttaataagtaaaatttaaatggggtggggggggatttaatatgttgtggatgaaaagaatagttattgatttttttatatttaatggtatgtaggagttttttaaaatatagttttatattaaatagatttgtgaattttaagtagaattgaattgtattaattagttgatgggtttgtttattttttattattagatgagaaatataaaggttgggaatttatagtgtttaattttattgtatttaagtaatttttttttttagtttagaaaattttttattagttgtatatgagagaaaaattgaagtaaaaaaaaaaaaatttgttttttgtttatttattaggtgaatatatattttagtattatatagaggaaattttaggtggtttttagtaagattttagtggttaagagttataatttagaaaagatgataatatatatatagtgttaatagtatttaaataaatattttagataatagaataatggttattaattatgatgttttgggtttttgattaattttttatgtttgtttgtagttaaatagttgtaggatttttttttttttaaaaattgtttgtgtattattttaaaaattgtatttaatagttatattttttagagtagtttttttgtgtggaattgaagtgaatggtttagtaatagtgatgaagttagtaagtagtaagaatgttttttatgttaaaagaattttaattattttgttagaaatgggttatatttttattttttgaaatgtagaagttgtttgttattgtatgatttttagtatggtttatatgtttaaataaatggaattatttaattttgtttatatttgtattagtgtttttaaaattgattaagttgtgtaattgtattaaagtgtattttttttggggtttgaaaatattaaagaaattaagagagggtaagattattttgtaaaattgtttttttatttttttagataaatattatattttaaaaattatttggtgatttaaagattaaaatgaatgtatttttgtatattttaaatatgtaattttaatgattatttagttattgtagttggaaatatatatatttagggatatagatatgtataattatgaatatttgggtaattatatattgtaattaattattaatgtatggattaaaattaaattatttttattgtttttattgttatttagtatttaataagtatttatttggtattaaaagatggttaaaatatattaaataatgttagttttttaaaaaggtattaaaatatttatattttagatagatatatatatgttgtatgtagtgtatgttggtgttttaaatattttattatttaatgttttgatttgatagaaatgttagattttaaattattgttttatttattttaatagttatatttgaaattttagaggttaaggagaaatgtttgtaatttatttttttagttgtgaatttttgtatttgaaaggttaaatttttttttttttagtaggtaattattttatgttttgaagtatgagatttgattatttttattattattttagtttgtatagatatagatgttattaatggttgtagtttatttaatttttttttaaaatgtagttgtagtatttgatttggggattttttgtgaattttattggttgattttgttttgtataaagtatgtggggtttgggggagggagaagagagagggaggtttgttttgttttggagggttttttttttttttttttgaattagagttttttaaatagttatttggtatttttgtaagtgatgtgaattttgaaattatttattagaataggataatagagtattgtgtgaattagatttgttggaaataaagtatagtagaatgtatgatgttttttattttattggtagagattaaatatgtggttttgatatatttatttatataataaagaattgtagtttattttgaaatatattggttatatttaaattggagtatttggttttatataataattgtttttataagtgttgaaatagtaatttggataaagtaggttttaaagttgttgtgaagggaagatagggatgtttttaaaatttgaaaggtttagattggtaatttaggtagattaaatttagtgattaattggttaatttaattattgttttttttttagtatttatgatttgtgtttttaagtattgtttttgtaggttatattattttttttataaaatagagaggatattttataggttttttatattttggaatatagtaaattttaagtattggtagaaagggaatttagaaaaaaattttgtgaagtaaaggaggttgatgttgtataaatattgaattatagttttaagatgtataaaatattgtttttaattttaattattttattagtaagtaagtgaaattgttttaattggagtttttagaagtttttttgggaaatgagaggtagttggatgtagtagaatgtagtggaatgagtattttaaagagtattggatttagtattaggagatatgggttttggggatgatttttgttttttagtgagtaagtaaggataagttgtttttaaggtttttattttttttatttataaaatgattatattagaggagtgttttgtaatttatgtgttttgtgattttatgttaaatggaagttaagttagattgtgtaatttataggaaattaggaggttgaagaaagtttggtagttagtatttttttggatgtagtttgtgttttgtttttttgtttttttagttatttttttgtttttagaaagttaaaaatgatttgtattgttttttaaggtttggagatttagaggatttgtttttgttttttttttattttattgttggggttgagtaaaaatgagttttttattttaagttttagtagtttttattgagtattattaggtaggtttatttatatattttatatttataaagtattattatgtgttagggtgtaagggattagaaagatgtttttatttgattatttttggagttagagaatgttaagatgtagtgggattttagaagttttggagttttagtttgattttagaattgaatttttgtttaattaagggtgtgaataaatgtaaagatatgatttgttatttgttaaggttgtggggtgaggggggtggttatatagagtattgtttttttgttgttagtagtgtttatttttttatttgtggggagtaatagattatttttggtaatatagtgtttaaaagtgttaagaaaaattttgtaatttaggatttattggattttagagaataagtgttttttttttggattgtttttgtttatttggggggtaaatttggataagaattaaataatttgtagagagatttatagtagaattaagagtaagtttgtaaatattgttttttttatttggtatttagtaagtatttattatgtgttagatattgttttatgatttatttttttttttattatttattgggtaaataatagttataggttgaattatgatgtggaagtaaatgtaaattaatttttttttttatataaataaataaataaataaataaataaaaatttgtgttagaatgtttttggatattaaatattaaaatttagttaagtttagttggtaggtttttttagtgatttttttggtttgagtattttttaattttgtatattggtaaggggaatggtattttaaaggagtgattttttagaggttgaatggtttttgtgaggggttgattataggggattggggaaggggtttttttaatattaattttattagttttgttagttgatgggaaagtttgtttttttatttttggtattttaatttagaagaatgtgtgtgtgtggagggggtgttaatggaaaaaatgttattgtttttagagaagttagtgaatggtagggttagtagttaattttagatagtttgaaattttgaggggtgttttgtatttttgttttttttatataatttagttaataggattttttttaatagggtattagtagaggaatgagttataatataatatagtttttagaggattgtagaattagtagatttttttaatataaggttagttttttagggtaattttggatagtttatgttattgtatattggtttagggttttttgtatatatttttagtgttttgtgttttattttaatttaaaatatttattattttttatgtgtttgttttttgttatatggagaaaggagttatgttattaatttgttatatttttagggtttggtatatagtgggtgtttagtatttgatgagtgggtagattgatggatgggtagaaatattttttgatttatggtttttttatgattttattttttattttttggattaaaatgtaaatattttttgataaaagaattttttttgtgttttaggttttggttttggttgagagttttatatttataagtgtttatagaggaaattaggggttatgtttgaatttgtttagaagggttttagaatttttgagggtgtggttatttttattattttttaaagtaataaatttatttttgtaatttaaggttttgtttttgttaaaagataattttgagttagatggtatttgttttttattaattattttttttaatggatttataggaaaaaatttttgaaagttaagattgaatagggtgagaatttttttataaataataatttggaatttagagaggtttagttatttgtttaaggttatatagtttgttggtatagttttgaatttttattttgtggtttttagtgtttagtttggttgtgtttttagtggttttttagggtatttgtaggtgatttttttttatttgtttaatatttatgtagtatttattatgaattaggtagtatgttggggtttgtggatagaaagatgaagagttatagtttttgttttgtaaaggtttttttttttgagttgtatttatggtagttttaagtttttatgttttaaatttgaggttttttgtggtttgtagtagttttgtttgagtagaaggtagtttgtattaaggttttaggtttatttgggatttggtgggtgatggggttttagttttttttgtttattttggagtttgttgttgttgttattattgaattagttatgttagaaagttattatgatgattttagaattgtattgtgatttatgtaaagtgtgttgataattatagttgggtgtatagaatataggatgtatatgttgtgggtgtgtgtgtgtagtgttgtgttttttgttagggttgaatggggtgtgtgtgtattttgtaggtatttttttgatattatgtttgattggggattggtgataggaaaaagagggaagatatttattttgattttgagataatttgatgagttttgggagtattttttagaagttttggtgtttataaatgagttagtttggtaggagtgtttgagagtaggggaagaggtggtttggagtttaggaaagttattgtttagtttttgtataggtaaagtaattagtagtttttttttttgaaatagatttttaaatgttttttttgtagataggtttgggtttagttattattttttatattgtttttatttttgttttagataaattagttttatttttgaagttttttgttttgaattaaagaattttataattgtgtttgtgttatgggggtggtggtggtaggtggttgaagtaagtggatttttggtgtgaattagaatttgaggattttaaatggagtttggtattttattgtgttttttaaattttgtttgaaattttttttttttttgggtgttgagtttgagaaagtgttatgttgttggttgggttagttttataagtggttgtataagttggttgttaaaaaatgttgatttttttttttgttatttaataaatttttatgtgtttatggttttgttttataattttttaattttgttttaatttgaaaaattgaggaggagggaataaattgagagataaagatttttttattttgttttttttttgggattttagttttggttgtggtgttttattaaggaggatataggttttggtgtgtgtggtgtgtgagattttgagtttgaggttgagttaaggttgggtagaaagttgtaattatgtgttgttggagtttattggagtgtatagtttgttttttttgggatgtttaggtggaggatttgttgtgtttttttagggtttgggggattttagtatttatttgtatgtataggtgaattttgattgaaagtttgggatgatattgagtttggagaaagagggattggggggtgggttggtggaattgtagagtgttggttatagtttttttttttgtgaatgttgagtggagggtgggaggtgtaatttttgatttttggttgggtttatgttttgaggagggattggtaagtttttgtttgataagtttaagttgttgagagagtttaaatagaattaattttttagagattggggattattgtttttttggtatgtgtttttttagtgttgtgtatagagtaaggtgtgagagagtttaggaattgtgggaaggtaagtggaatggggagggggtaggggatgagggtttttttttattatttttttgtttggagagtgggagtttgtaatgtttgttgaggatgagtggtgggagggaatgttttgttttttagttgttttggtgtagataatggaggtgataagagatttgtttagtgttggatgggttagttttgtttggggaagttggtggtattttttttttggttggtgtttaaatttattgtgtgaaggttgaaggaatgtggaatttttagaagattttatttttagttttgattttttgtagatatgtgtaaaatgagtaaattatttattttgggttagatttaagttttatttaatagaaggggtattggattaagaatgaattaatttatatggttatgtttggtgtgtataattatatgttagtatatagttatttaattttttttgtgaatttatttggtattttggagagagggggaaaagtgttttgagaaagttttgttattttttttttttttttttgttgtgaaatatatgaatttatttttattatgagttgtattgtttttattattatgtatgtatagagttatatttttatatttatattttttaatttgtaagttttgatagtgtttgtattttttttgggagttgtttggaggtttattaatattattagtatttaattttttttttttttttattttttttttgtatatggttgatgttagattttgttaggagttgggggaaaagttaagtgggttagggatgttttatttttttttttgtggttgtttgttagagtgtttttggagatattataggggatttagtttgtagtgataggtataaagttatggggtaatgaattttggggattttttgttgttgtgtgtgtggttttttttggaaatttggatttggttgtttttttttttggaagattttttagtaatttagtttttttattttgtgtttgggttttggtagtgtggagtttgtttgtttttgagattgtggtagtgttttttttttttttttgggagattagtggttggtagagattgtttatattttgtatgtttatgtagagggagagattgaagattgagtgataggaatggggaaaaagagggattttgttttgtaggaaggttatttttgtgtttttatttttgttttttaatattttttttttgttgttttttttttttttttagtttttttgtttatttttttatttgtttgtttatgtgtgtgtttatattaagtagtatttttagtagttgtggttttgtaagagttgggaagaaatttaaggatgtttaaatttttattgttggatgaattttgagtgtttagggagtagtgtagtgtgtgattgatatttatttgttttgtttaggagttttgtaggttggagggtagttggagagtggtggtgtttggtggtgaggtgggtgttgttggttgggatttgggtagtgtttattaattgttttgttttgggatagttagtatgagtaagttagttggattaataagtgggtattttttgggttgttgtggggtttaggtgtgtagtttggggtgagtgagtggggaggttgggggaggttttgtttggagtgttgtgaatttgagtttttgagagggattttagtgggtgtgtgtgtttggtttagatttgtagattgtgagttggagtattttgtggagaggggagagttgttttgttgtttttggattgtttgattttttttgtttggtgtggtgagaaggttatgatttgtgtagtttattagttggatgagttgtttttatttagttgttaggtgttggatgggggggttatgggggtgggaattgggttgtagttttaggtggtagtataataatatatttgtttaaaattttgagttttagtgtgtaaaagtaattttgtgtaaagtggattttgaatggaatgttttgtattttgtttttagttattttaaataattttgtaaattgggaagtagaaataatttaaaagttatattttttttaattttaaatttgtgtaggttataattggggaatttaaagtatggtgaattattttagtaaagagaggattaaatttttaattttaaggattttttgagttggagtttagtagaggtaggagtgtgtggtttgttttttttgtgtgtttttttttttttttgaatttttttagttgttggttttttgaatgttaggttgtagttgattttttattattttgagatttatgagtgtagggttaagtgtgtgtgtgagggtatttgtttgtattttgtttgtggaatttaagaatgtgtaggtttgagttagtgttgagtaggtgtggttatggtgtttagattttttgggggtattttagtttttgttatttagtggtttatggttgtgggttttagggtttgaggttggggattattgttgttgttgtagtttttatattttgaagttgttttgttgtttgtgttgtttttgtagatagtatttttggtgttttgtgtgtttttttttttttttttttttttttatttgtttttattgttttgagtttttgaaagttgggagaattggagatatttttgaggattggtaatgaagttttatttaagtgggatgtaatttttgtttttttatttttttttaagaaggaggttgtgtttttattttgttttgttttgggtgttgatttttaaaaaattagagtaaaatgaatgtgaataaaaagaaaaggagaaatgttttgagttggggtagagggagtagagaaggagtttttattgtggttggaatgtagagtggattttggtttaggattgggtttttttttaggtttgggtttattttggtttttgttgttggaatttttaggaggtaaagtgattttgatttttgttgtttgtatttttgggtgtgagtgttttttttaggaggtttaggaggttgtttttgttgtattttgagtttttgttgtaaaaattgaagtttgtgggttttggtaggttttttagtttgtttgttttgggataggtttttgtttatatttttggaagtaaggagttttgggtttttttgttttttttggggtgtggagtttttggggtttttgaaaggtgaggttttagaggtgagggaggggtgagtggggagttttgtttgtttgtggttgtgtttttgttgtggattaggaggtaggttaattttttggattttgggggaaaaattatagtgggttttttgtggaaattttggttgttttaatttgttaagagtttgagtgaggttttggaagtttttagttttggtttaggttgggatgtggttgttgagtttttttaggtttgtaggatagtggtttttgttggtggtgttgttgtatttaggttttttttagattggtggtggtagttaatttgagatttgtgttttttgggtttggggtagttaggaggttggtgtgtagtgggttgggttaggattgggttgagtagatagagttgtagtttttgttttgtttggttttttgtggttggagagtagagtgatgttatttggagttttgtttgggtggtaatgagattttggttagttatttttgtagtttagattaattttttttaatagtttttgatggtaattatagtaattgaagttgttatatatttttaggtaattatgatatataaaaagttttgaggggattttttggtgagggaagttaagaatggttttttagttttaggaaattttggtttgttttatgttggagtttgtttggtttgttaaatgagaggagttttgtaatggggttaattagtttgttttgtgattttaagttattttaatgtggttgggtggtggagtttgaggtataggtttgttatgttttggaatttttgtgttttttttttttgggttttgttttagtttggttgtttgtttttaatttgttttgggagttgtggtttagaggtttgtttagaggtaggatttgtattggtggtggtttagagggtaatagtttggaagtttgggtgggggaatttgaggaggggtttttattttgtattggttttttttttatttttattgggttttttagagatgttgttatgggttttttgtttggatgggaagtggggaaaaagagattttattattgttttttttatttatttattttggtatttttaatagtgttatagggaagaggatagttggggtgatagtattgttgggttttaaatgtggattttggagtggttagagggtgtgtgttaagtagaggatggttgtaagatatggaaattaagtttattgtttttagagtgagtgtagtgtagtggagttttagatttggtttttgagtgattaggaatttttttgggtgtagtgataggtttgaaggagtggaggataagatttgttgtgtttttgtttggttttttttagttttttttttttatagtataatttttttttttgttttgtgggaggggggtgttgagttggtggttgttgtgttgtgtgttttttttgtttgtttttgttgttgtttgaatttttatgttattttttttgatgggttattggtggttttataggtaggtgttgttgtggggttgtaattatttggttgagtttggttgttattgaatatttttttatttttaagtatggttttttgtgtttttttttttttattttttttatttgagatgagtttgggatttatggtgtaagtttgtttggatgttttgggttttaggagtaagtttatatttgtggtgttttgaggttttttttgtgttatgtttttattttttttattttttttgtttagatgttttattgttgtttttttttattttaattttattgtagtttttaatttaagtgtttttggtagtagttgttgaattttagggaggtttgaggttgttggggtttaaattggaggtttttggataggtagaagaagagaaaagtaagtgttaataagttaattgttattaatt

SEQ ID NO: 292 - DNA, 13537 bp, Artificial Sequence
  chemically treated genomic DNA (Homo sapiens)
agttgataataattgatttattaatatttgtttttttttttttttatttatttgaaggtttttagtttgggttttagtggttttaggtttttttgaaatttgatagttgttgttgaaagtgtttgggttggggattatgatgggattgaggtgggaaggggtggtagtggaatgtttgggtgaggggagtaggggaggtgagggtgtggtgtggggagggttttgaggtattgtaggtgtaaatttgtttttggaatttgaggtgtttgggtgagtttgtattgtgggttttagatttgttttaggtggagggggtgggggaaggagagtgtgggggattgtgtttgggggtgagggggtgtttggtaatgattaggtttggttgggtaattataattttgtggtagtatttgtttatagagttattagtgatttgttaaaaagagtagtatgggaatttggatggtgataaaggtgggtaggggaggtgtgtggtgtggtggttattggtttggtgttttttttttatagggtgggaggggagattgtgttgtgggagggaggggttggagagggttaggtaagggtatagtgggttttgttttttatttttttgggtttgttattgtgtttaagggagtttttggttgtttaggaattgggtttggagttttgttgtattgtatttattttggaagtggtaaatttggtttttatattttataattattttttgtttaatatgtgttttttgattgttttagggtttatgtttggggtttagtagtattgttattttagttgtttttttttttgtggtattgttgaagatgttaagatgagtgagtgggaggagtagtggtggggtttttttttttttattttttatttggataggaggtttatgataatatttttggagaatttgatgagggtggagggaagattagtgtagggtgggggtttttttttggatttttttgtttgagtttttggattgttgttttttaggttattattagtgtgagttttgtttttgagtagatttttgagttgtggtttttggggtagattagaaataggtaattgggttggggtggggtttaggagggagggatgtgaaaattttggggtatagtgggtttgtgttttagattttgttatttagttatgttaaggtgatttggggttatgagataagttggttgattttgttgtaaagttttttttatttagtaagttgagtgagttttgatgtgaggtgagttggagttttttgaagttggaaaattgtttttaattttttttgttagggggtttttttggggttttttgtgtgttataattgtttaaagatatatggtagttttgattattgtaattattattagaggttgttgaaagaagttagtttgggttgtaggggtgattggttagggttttgttattatttaggtggggttttgggtgatattgttttgttttttagttgtgagaagttgggtaaggtgggggttgtagttttgtttgtttgatttagttttgatttggtttgttgtgtgttgattttttagttgttttgggtttgagggatgtaagttttgggttggttgttgttattggtttggaaagggtttaaatgtagtggtgttattggtgggggttgttgttttgtgggtttgagaaagtttagtagttgtgttttgatttgagttggggttggaggtttttaaggttttatttaggtttttggtaagttagaatggttaaagtttttgtaaggagtttgttgtggttttttttttaaagtttggagggttggtttgttttttagtttatagtgggggtgtagttgtaggtgggtagagttttttgtttattttttttttgtttttgaggttttattttttaagggttttaggggttttatattttgaaaaggatgaaagagtttggggttttttatttttaggggtgtaggtgagggtttgttttggggtgagtgagttaggaggtttgttgagatttatgggttttagtttttgtaatggaggtttagaatgtaatagaaatggttttttgagttttttgggaaggatatttatgtttgggaatgtgggtaataaaaattgaggttgttttattttttggagattttaatagtgagggttagggtaggtttgagtttaaagggaaatttagttttgggttagggtttgttttgtattttggttgtggtgagggttttttttttgttttttttgttttagtttgaaatatttttttttttttttttgtttatgtttattttgttttaattttttaaaggttagtatttaaagtaaaataaaatgaaaatataattttttttttggaggggggtaggagggtgggaattgtattttatttaagtgagattttattattagtttttagaagtatttttgatttttttaatttttaaagatttaggataatgagggtgagtgaaagggggagggggagggaaggaatgtatagagtgttaaaaatgttatttgtgaaaataatataagtagtaaggtaattttgggatatggggattgtggtggtaatggtagtttttagttttagattttggagtttgtagttgtgggttattggatggtgggaattgaaatgtttttgggagatttgagtattgtgattgtgtttgtttaatgttggtttgggtttgtatatttttgggttttgtaggtagggtgtaagtaaatgtttttgtatatatatttagttttgtgtttgtgagttttggggtggtgagaggttagttgtggtttggtgtttggagagttggtagttaaggaagtttgaggaaggagagaagtgtatggagggagtaggttgtgtatttttgtttttgttgggttttggtttgaaaagtttttgggattagggatttggttttttttttgttagagtggtttgttatattttaaattttttagttatgatttatgtggatttaggattaaggaaaatgtgatttttaaattgtttttgttttttagtttgtaggattatttgaaatagttagaaatggggtgtaaagtattttatttaaaatttgttttgtatagagttgtttttgtgtgttggagtttggagttttgagtgagtgtgttattgtgttattgtttggagttgtggtttagtttttgtttttatggtttttttatttagtatttggtggttaaatggagataatttatttgattggtgggttgtgtgggttgtaatttttttattgtattagataggggggattaagtaatttagaggtaatgaaatggtttttttttttttatgaaatgttttaatttatggtttataggtttgggttgaatgtatatgtttgttggaattttttttaggggtttagatttgtagtgttttaggtaggattttttttagtttttttgtttgtttgttttaggttgtgtgtttaggttttatggtggtttgagaggtatttatttgttgatttggttggtttgtttatgttggttgttttggggtggagtggttggtgggtgttgtttgagttttggttggtagtgtttgttttgttgttgggtgttgttgttttttagttgttttttagtttgtaaggtttttgggtgggataggtgggtgttagttgtgtgttgtgttgttttttgggtgtttagaatttgtttaatagtggaaatttaagtatttttaagtttttttttggtttttgtaaaattgtagttgttgggaatgttgtttgatatggatatatatatggatagatagatggagagatggataggaagattgaggaagaaggaagaatagtaagagagggatgttgaaagatagagatggagatatgaaaatggtttttttatggagtgaaatttttttttttttttatttttgttatttagtttttgatttttttttttatataggtatgtagagtgtgggtaatttttgttgattgttggttttttaaggaaagaaggaaaatattattgtagttttagaggtagatgggttttgtgttgttggaatttaagtgtagagtgggaaaattagattgttgggaaattttttgagggaagaggtggttaggtttgggtttttggggagagttgtgtatgtagtggtgaagggtttttgaagtttattattttgtgattttgtgtttgttgttgtgggttgggttttttgtaatatttttagaagtgttttgataggtagttgtggggaggggaatagggtgtttttggtttatttagttttttttttaatttttggtggggtttgatgttagttatgtgtggggaggggatgggaagagggagggggttaaatgttaatgatattaatgaatttttaagtggtttttaaagaaaatgtaggtgttgttggagtttatgagttagaaagtgtgaatatgggagtgtggttttgtgtgtgtgtgatggtgaggatggtgtggtttgtaataaaaatgaatttgtatattttatggtaagaaggaaggggaggggtgatggggtttttttaaaatgtttttttttttttttttagagtgttagatagatttgtggaagaaattgggtggttgtgtgttggtgtgtgattgtgtgtgttggatatggttatgtgagttggtttatttttggtttggtgttttttttgttgggtaaaatttggatttggtttgaggtgagtaatttatttattttgtatatatttatggaaagttagggttgaggatggggttttttggaggttttgtgtttttttggtttttgtgtagtgggtttgggtattagttgaggggaggatgttgttagtttttttaagtagagttggtttatttgatgttgagtgaattttttgttgtttttattatttgtattggggtggttggagggtagagtgtttttttttgttgtttgtttttggtgggtgttgtgggtttttgttttttgggtggaggaatagtgaagagaggtttttattttttattttttttttattttgtttgtttttttgtgatttttgagtttttttgtgttttgttttgtgtgtggtgttgggagagtgtatgttgagggagtgatgatttttgatttttaagagattaattttatttaagtttttttggtagtttgaatttgttgaataagagtttgttagtttttttttagggtgtggatttggttagaggttagaggttatattttttgttttttgtttgatgtttgtggggaggggagttgtggttggtgttttgtaattttgttagtttattttttggtttttttttttttagatttggtgttattttgggtttttaattagagtttgtttgtgtgtgtaagtgaatgttggagttttttgagttttgggagggtgtagtaggttttttgtttgggtgttttagggggagtgggttgtgtgttttagtgggttttgatagtatgtgattgtaattttttgtttagttttggtttggttttgagtttggggttttgtatattatatatattagagtttgtgttttttttagtggggtgttgtgattaaggttggggttttggggaaagagtaagatggggggatttttattttttagtttatttttttttttttggttttttgaattgggatgagattgggggattgtgggatgaggttataagtgtgtaggggtttattaggtgataggaggagaaattagtgttttttgatagttaatttgtatagttgtttgtggagttagtttgattggtggtgtagtgtttttttgaatttggtgtttagagaggggaggaattttgggtaggatttgagaaatataataagatgttaggttttgtttggaatttttaggttttggtttatgttagaaatttatttgttttagttatttattattattatttttataatgtggatgtgattatggggttttttggtttaggataaagaattttaagggtggaattaatttatttggggtgaagatgagggtagtgtggggggtgatgattagatttaggtttgtttgtaggggaagtatttaggggtttgttttgagaaggagaattattaattgttttgtttgtgtgggggttggatgatggtttttttgggttttaaattatttttttttttatttttgaatgtttttgttaggttggtttatttgtaggtattaaaatttttggaaaatatttttaaggtttattaaattgttttaaaattaaaatgggtatttttttttttttttttgttattagtttttgattaagtatggtgttaagaagatgtttatggaatatatatatattttatttagttttggtgaaaggtataatattgtgtgtatatatttgtagtatatgtattttgtgttttgtgtgtttggttgtaattattggtgtgttttgtataaattataatatagttttgaaattattgtgatgattttttggtatgattggtttagtggtaatggtggtaataagttttagggtaggtgggaggggttgaggttttgttgtttattaggttttaaataagtttggagttttagtgtgggttgttttttatttaggtaaagttgttgtaggttatgggggattttggatttaaggtgtagaaatttggggttattatgggtatagtttagagaagaaagtttttgtaggataaagattatggttttttatttttttatttataggttttagtatgttgtttgatttatagtaggtgttgtataaatgttgggtaaatgaagggaagttatttgtagatgttttgaggggttattggaggtatagttaggttaaatgttggaaattatgagatagggatttagggttgtgttaataagttgtgtgattttaggtgagtggttagatttttttgggttttagattgttatttgtaaaaggatttttattttgtttggttttaatttttaaagatttttttttgtgagtttattaaaggaaatgattgataaggggtaaatgttatttggtttagaattattttttaatagagataagattttaagttataaggataagtttattgttttggaaggtggtggggatagttatatttttagaggttttgaaatttttttaaataggtttagatatagtttttaattttttttgtaggtgtttgtgagtatggagtttttaattaaaattaaagtttaaaatgtagggaaggtttttttattgaaggatgtttatattttggtttaagagataggaaataagattatgagaggattatggattaaggggtatttttgtttatttattaatttatttatttattaaatattgagtatttattatatgttagattttggggatatagtagattaatgatatgatttttttttttatgtagtagggagtagatatataaaagatgataaatgttttagattgggatgaaatataggatattggagatatatataaggagttttaaattagtgtgtggtgatataggttgtttagaattgttttggaaagttggttttgtgttaggagaatttattgattttatagttttttgaggattgtattgtattatagtttatttttttgttagtgttttgttaaagagaattttattaattaggttgtatgagagaggtaggggtatagagtattttttaaagttttagattatttgaggttgattgttagttttgttatttattagtttttttaaaaatggtgatattttttttattaatattttttttatatatatatatttttttaaattaaaatattgaaggtgaaaggataagtttttttattagttagtagagttgatggaattggtgttaaagagattttttttttaattttttgtgattgattttttatagaggttatttaatttttagagagttatttttttaaaatattattttttttattgatatgtagagttaagagatgtttagattaaggaaattgttgggaaaatttattagttgagtttggttgagttttgatgtttagtatttaaaaatattttgatataagtttttgtttgtttgtttgtttgtttgtttatatgaaggaggaagttgatttgtatttgtttttatattataatttaatttatggttgttgtttgtttagtggatggtgagagaggaggtgggttatggagtagtgtttggtatatagtaggtgtttgttaagtgttaaatgaaagaaatagtgtttgtaggtttgtttttgattttgttgtggatttttttataagttgtttgatttttatttaaatttattttttaaataaataagaataatttagaaaagagatgtttgttttttagaatttagtgggttttgagttgtagggttttttttgatatttttgagtattgtattgttaaaagtagtttgttattttttataagtaggaagatgaatgttgttaataataaggagataatgttttgtgtgattattttttttattttataattttaataaataataagttatgtttttgtatttatttatatttttggttggataaaaatttagttttaaagttaggttgagattttgaggtttttagagttttgttgtattttgatattttttggttttaagaataattaagtagaaatatttttttagttttttgtattttggtatatagtggtgttttgtaaatgtggaatgtatgagtgaatttgtttgatgatatttaatgaaagttattgaagtttgaggtgaagggtttatttttgtttagttttagtaatggggtaggaagggaatagggataggttttttgaatttttaaattttgggaagtagtgtaggttatttttggttttttgaaaataaaagaatgattagagaaataagaaagtagaatatagattatatttagggagatattggttgttaagttttttttagttttttaattttttgtgaattatatagtttaatttggtttttatttagtgtggaattatagagtatataagttataaggtatttttttaatgtagttattttatagatgaggaaagtgagaattttagagataatttgtttttgtttatttattgagagatagagattatttttagaatttatattttttgatgttgagtttagtgttttttgaaatatttattttattgtattttattgtatttagttattttttattttttagaagggtttttagaagttttaattaaagtaattttatttatttattagtgaagtaattagaattaagaatagtgttttgtgtattttgaaattatagtttagtatttgtgtaatgttagttttttttattttatagggtttttttttaaattttttttttgttagtatttaaaatttgttgtgttttaaggtataggaaatttgtgaggtgttttttttgttttatagaagggatgatatgatttataggagtaatatttagagatataaattatagatgttgagaaaaaggtaatgattagattgattaattaattgttgaatttgatttgtttggattgttaatttaggttttttagattttaaaaatgtttttgttttttttttatagtagttttaggatttattttatttagattattgttttaatatttgtagaaataattgttatgtaaaattaggtattttagtttgaatgtggttaatatattttagaataagttataattttttattatgtggatgagtatattaggattatatatttgatttttgttaatgaagtgaaaagtattatatattttattatgttttgtttttaatagatttagtttatatagtattttgttgttttattttagtaagtaattttagaatttatattatttataaagatgttgagtggttatttagggaattttgatttaaaaaaaaaaaaaaaaaattttttaaaataaaataaatttttttttttttttttttttttttaaattttatgtgttttgtgtaagatggagttaattagtgggatttataggaggtttttaagttaaatgttgtagttgtgttttaaaaaagggttggataaattatagttgttaataatatttgtatttatgtaagttaagatgatgataggggtaattagattttatgttttagggtataagatgattgtttgttgggaggaggaggatttggttttttaggtataggagtttataattgaggaggtaggttgtagatatttttttttagtttttaaaattttaggtgtaattgttgggataggtgaaatagtgatttgaaatttaatatttttattagattaggatattaaataatgagatatttgaaatattaatatgtattatatataatatatgtgtatttatttaggatataagtattttgatatttttttggaaggttgatattgtttgatatattttgattattttttagtgttaagtggatatttgttaagtattaaataataatgaaaatagtggaggtaatttgattttagtttatgtattaatagttagttataatgtgtaattatttaagtatttataattgtatatatttgtatttttaaatatatgtatttttagttgtagtagttaaataattattggaattgtatatttggagtgtatagaaatgtatttattttaatttttggattattaagtaatttttaaaatgtaatatttatttggaagagtgagaaagtaattttgtaaaataattttatttttttttgatttttttaatatttttaaattttaagaaaggtatattttagtatagttgtataatttaattaattttgaaaatattagtgtaagtgtgagtagggttaaataattttatttatttagatatgtaaattatattgaaggttatatagtagtagatagtttttatattttagagagtaaaaatgtagtttatttttagtagagtggttagagtttttttggtatgaaagatatttttattatttattggttttattgttattgttaaattatttattttagttttatatagagggattgttttggagaatatggttgttaaatgtaatttttaaaatgatgtataaatagtttttaaagggggaaaaattttgtagttgtttggttgtagatagatatgggaaattagttagaagtttaaagtattatagttaataattattattttgttgtttgggatgtttgtttaaatattattgatattgtgtatgtattgttattttttttaaattgtagtttttaattattgaaattttgttaaagattatttagggttttttttgtatgatgttgaagtgtgtatttatttgatggataaataaaaaatagatttttttttttttgttttaattttttttttatgtgtaattagtaggaaattttttggattaaagggagagattgtttaagtatagtagaattagatgttgtggatttttaatttttgtattttttatttagtgatagaagatgaataaatttattaattgattaatataatttagttttgtttaaaatttatagatttgtttggtatgagattgtattttaaaagatttttatatgttattaagtgtgaagaaattagtaattattttttttatttatagtatgttgagtttttttttattttatttaaattttgtttattaagtgaggttatttgggagaagagtggttttggtgggtggggaaaagaaaatttaatagtttaatttttaagttgagtgttttagattatgggttatttagtataaagtgttttatattttgatttatgaggggataatagttggttttataaaggtattatttgtgatttagtatggttgatatttttgttaaggaggagttggagggtagtggtgaaatagtatgtgtatgatttggattgtattatggtgattgattgatttttaagattgttttttgttgttgtggaggtttggttaggttttttggtttatagtttttggaaagggtgtggggagagagaaaggaaatgagtgttgtatatgttggtggagttaaagtttttggatttatggtttgttagtgtttagttgttttattttatagatgggtaaaatggaggttaggtttgtggagtgtttggtttagtaggtgtagtggtttggatttttgtggggttttgggattgtagggttgggggtgtgggggggtggtgtggttgtgggtgggatgtagagtttttgttttgggtttaatttttgggttggtggttttttgttttttttttgaaggttgtttttgataaatttatttatttggggtaaattgttagtgagaaatttttgtttgaattgttttggataaaattggttgtttgaaaagggtaaattttgtggtttggtgaggttgaataatgggttgttggtgtggttgtggtgggggtggttgggtgggttgtataaagggtggattaattggggttgtggttgagtggtttgtgttagttttatttagtttgtgttgtggggtgttttattgattgggttttgagttttattttttataaattttaaataaaagttaattttttttttataaggtgggggagggggttgtggttaagattttttatttgtttttgtgatttgtttttgttgtatggggggttttgggggtttaaggaattggaggtagaagggtttttggggatgtttgagaggggaaagagatgtgggtgtggttgttgtgtttttgtttttttttttgttgttttgttttgatgtgtgttgtattttttgggttgtatttataggtaggggttgagattttagtttgaggtttggaagttgtgaagaagtgggatgaggtggtggttggattgaggtgaaggttggggtatttggttgggggaagtgtaggtaggtgatttgggaggaaagaatatgtttttttgatattttaaattttgggaagggtggttatgtattagatagttattgagaaattattgtgtttttgatggtgaatttgtttttaatggatagataagtgggtggggggtagatttataagttaattagttagtaggtgagggattgtggttagtatggggtgttaaaggaagttattatttttttgtaaaatgatgagatggatttgttggtgtaatatgtagaagatatttaattatagatatagattttgtatttggagaagtggtggtgattagaaaataaataaataaatttaaattgtaggattaatattgttattggtttatatattttgtaggaaggaattaggagtttgtttttttttgtttttttttttttaaaataggagaatgattgtagagggttttttagttgatattgagaggagtaggaaatttttttaataatataaattgatatattttttagtttataagtttttgttggaaattggattggtggtggttgtata

SEQ ID NO: 293 - DNA, 2567 bp, Artificial Sequence
  chemically treated genomic DNA (Homo sapiens)
ttattgaggtgttatatgtatttaaaaattattattagaaagagaatttgaattttttgatttagagtttggtttattgaatttatttaagttttatttagtgttagatttatttggtatttttttttttttagtgaggaaattttgattaggtttaaggtaggaaggataaatatgagtagagaggtaaaaaaagttagaattaaattgtaagaggtttaatgtggtatttatattaatttattggttttttttaatattatatttatatatagttatttggttttttttttattgtggggtgtgagaggtgatgagtaataatttttggttatgtttgataattttgtagttgttggtttttgagattaagggaatattatttatttgtttttattttgttttaattgggttgtagatttttatgattgggatattatagatataatagatttttttattgaagatgtaggttttttgaaagttattgtgttttagagaaatgtattttagttatatattgtggttaggattataatagaatatgtgtttattgttgagagtatagagatagttttgaattattattaggttaaaggataaaaaagaatggggtagtggagttattaatgtttattggttttttttaatattgtagtattttattttttttaatttaattttagtaatagggttttgtttttttaaaatgtagatatagttattgagatatgttatatttatgtttttatgatatagtaagtgatttgtaagttgttgttaattattttgagttggtttatatatttagaggtttgttttgggttgagtagttagatagatgttatggttaggagagatatagatagttaaagtggtgatagttttagtgtgagttagataggttaaaggtgatggtattttgtaaaggttttttgagtatggattatagtagagaaagggatttttggggtgtttaaagaagattattatttttttggtatatatatttagtttttggggtggattttttgttgtagatataagagagttgttgttgttattgttgttgttgttgtttggtattggtattagagatttgtataataggttattatagtgtatttgtagggtttttttaataatgtttaggtagtatttttttatgatgggtttggttagtagtttttttaagtagttttgattttttttagtgaagtgtatttagtgtatgtatttgaagatttttgtagtattgggattttgttttttgggagtagtttttagttattgtattgttatatggtatattgtttgtttattttttatgtttagattatttaagtgtaggatagttagtagttgggttagggttagatttgttagagtttttttttgaattgaatttatgtggttgagttgtttgaagttttgagttatataggattgggtttgggattgtagtttgtgatggttaaaggtatttgtaaatttgaggatggtggtgtagttggttaggttaagatgttgggttaagaaggaggtataggttttttgtatatattttagttgtagtatgttggaggttgtgtataggtgttttatgttggttttattgagagatatatgatttgtgtagtagtagttgattaatattttgaaggatttggtgtttatattgtgtatggttatgttggtttgttggtttttgtatatgttatttgtgaatatgtttttgaagtagggatatgttgtggttagtatattgtggttgtaggggaataggtgatttgtgttaggtttgttgttaggtgttattattttgatggttatattatatagtagttgtgtattgtagaaggatttgagttgtgttagtagggttgtagaatgggttgtgttttttaatttttttggatttgtgaaaaaggttgaaattgtgggtttgtgaatttttttgggttgttttttattatggggattggttaggtggtgagagtgtggggtgtttttttgggattgtatggtggagatggtgatgggtgttgatggtgagaaatgttgtaggatttggttttggtttttttttaatttttttttgttgatgttaagatagtagtgtttttgaagagatagtagtatgagtttatttattgaatttaattttattttgtagaattgttttttgttattgtttagatagtggttgatttatttttttttatttttgtgttttttttttgtgtttgtttgtttttataggatttgttggtttggagttgtagaagttgttattgtagtgtgggtgataatgttaggtgtttaggagaattattgtttttaggttgttttttgtgttttgagggttgttgggatttttggatttttgggttgagattgagggaaagaatttgttttgtatgttgggagtagtagtttgtgtaatattgtgatttttttttggtgttttttgttttagttgatgatatttgagagtgttaatttttttagatttgattttgtggtttggaattgtggttttggaatttagagtagttgttttgttt

SEQ ID NO: 294 - DNA, 2567 bp, Artificial Sequence
  chemically treated genomic DNA (Homo sapiens)
gaatgaggtgattattttggattttaaaattatagttttaaattataaaattgaatttaggaaaattggtgtttttgagtgttgttagttaaaataaggaatattagagaaggattgtgatattatataaattattatttttgatatgtaaagtggatttttttttttggttttggtttgggagtttgagagttttagtagtttttggggtgtgaaaggtaatttgggagtggtagtttttttgggtgtttagtattgttgtttatgttgtagtagtggtttttgtggttttaagttagtgggttttgtgaaggtgagtagatgtggagaaaggatgtgggagtgagagagggtgagttagttattgtttaaatgataatgggaggtggttttgtggggtagggttgaatttagtaaatgggtttgtgttgttgtttttttggagatgttgttattttagtgttagtgagggaaggttgaggaggagttagagttgggttttgtagtgttttttgttattagtgtttgttgttatttttattatgtagttttgggaagatgttttgtgtttttgttgtttagttagtttttgtggtgggaagtggtttaagaagatttataaatttatagttttggttttttttatgggtttagaggaattaaaggatatggtttattttgtagttttgttggtatagtttaagtttttttatgatgtgtggttgttgtgtgatgtgattattgaggtggtgatgtttggtagtgggtttggtatgggttgtttgtttttttgtaattgtaatgtgttggttgtggtatgtttttattttaagagtatgtttataggtggtatgtatgagagttagtaggttagtgtgattatgtatgatgtggatgttgagttttttgaggtgttggttgattattgttatatgggttgtgtgttttttagtgaggttaatgtggagtgtttgtatgtggtttttgatatgttatagttggaatatgtgtgggaagtttgtgttttttttttagtttgatgttttgatttgattaattgtattgttatttttaagtttgtagatgtttttggttattgtaagttgtgattttaggtttagttttatatagtttagaattttaagtaatttagttatatgggtttaatttgggaggagattttagtagatttgattttggtttagttgttggttgttttgtgtttggatagtttggatgtggagagtgagtagatagtgtgttatgtggtagtgtagtggttggaggttgtttttaaagagtggggttttagtgttgtagaagtttttaagtgtgtgtgttggatgtattttattgaagaagattaggattatttagaagggttgttgattaagtttattgtgaagaagtattgtttggatgttattgaaggggttttgtagatgtgttatggtgatttgttgtataagtttttggtgttagtgttaaatagtagtagtagtagtagtagtagtaatttttttgtatttgtagtagaaaatttattttagagattgggtatgtgtgttaaggagatggtgattttttttggatattttagagatttttttttttgttgtgatttatatttgggggatttttataaagtgttgttatttttgatttgtttggtttatattaggattgttattattttagttgtttgtattttttttgattatgatatttatttagttgtttagtttaggatagatttttgggtgtataaattagtttagaatagttggtagtaatttgtagattgtttgttgtgttgtgagggtatggatgtggtatattttaatggttatatttatattttgggggggtgagattttattattggagttaagttgaaggaagtggaatgttataatgttaagagaaattagtgggtattggtggttttattgttttatttttttttattttttgatttaatggtaatttgagattatttttatgtttttaatagtaagtgtatgttttgttatgattttagttataatatgtggttgaagtgtgtttttttgaagtgtaatgatttttaggaagtttgtgtttttaatgaggagatttattgtatttgtgatattttagttatgaaggtttataatttagttagggtagaatggaggtaaatgaataatatttttttggttttagagattaataattatagaattattaagtatggttaaaaattgttgtttattattttttgtattttatagtggaaaaagaattgggtgattgtgtatgaatatgatattaggggagattaatggattaatataggtattatattaggttttttgtagtttgattttaattttttttgtttttttgtttgtgtttattttttttgttttgaatttggttagagtttttttattgaagaagaagaaatattaagtgagtttagtattgaatgggatttaggtggatttagtgagttagattttgagttaggaagtttaagttttttttttgatgatgatttttgggtgtgtgtagtgttttagtga

SEQ ID NO: 295 - DNA, 10664 bp, Artificial Sequence
  chemically treated genomic DNA (Homo sapiens)
gtgtggggggtgtggtttgaagagattaaatggaggtggaggtatgggttaaattgaattttttaggttatgggaggggtatggttgagggttttttttgtttttagatgtgatggtgtggtttaatgagtgggttatgggttgggtgtttgggttgggtttgaaggaatttgttatgaattttatggagagtggggtatatggggtattgtttgttttggatgagatttttgattattttgatttggttttgtttttgtagatttttatgtagaatgtataggtgagttgttgttgggtttggagtatgttgggtgtttttattttgtagattgtatgttttaattgttttttttattttttttttttaggtttggtagtttttggagaaggaatttagtaattttatttttttaggtatagataggtggttggatgaggtgggtgtggtaatagtttagagggttttgtttttagtggttttttgagaggttgagttgagggggtggggtttgattattaatggttatggttggaggtggggttaggagaggggtggggttaaaggagaggtgagatttggagaggggtggagttaaaggaaggggtggagttagataaggtaggagttttttattggttgtttggtttttatatttaggatagtgttaagttttttagttgttttttattttggtggaagatgttttgggagaaggatttttgaggtgtaatttttgatttagttgagatgttgttttttaatttttgtttggttgtagtgggagttttgggttttttggggttttttttttgtaagttgtagttagaaggtggggggtttttaaatgtgatagtttttttttgtttttttagggtggggtatggattattttagtagtttgggttttggaatggtttagtttttttttgtttatttttgaggaatggattgttttaatgttttggatttttttgttaggatgaaatggataaattttattttttttttttagggtgggagtgaatttgtttaatgtgagtttgagtttttggttgtggggaagggagggaaatttatgtggagtttggtgattgttgtgatattgggaagggaagtttaaagggaggaattttggagaggaatagggaggagggtgttttaggttgaattgttgtttgttttttttttaggttagatttttgggagtttttgggtagatggtgttttggtttggatttatttttgttagtgtaggtttttaggtgaggattgtgttgggtgattttgggggtgtggggtggtatggtggatttttattgttttatgtgttgtttggtgttatgtaggtgattttatttggatggaagaatttttttgaggttgggttgtttttttttttgtttggattgtggttttgttggggagagtgggtgggggagtttgtgttgaggattggattatttgtatagattagtgggagtgtgtgtgtttgttttgtatagggttggggtttggattaaattatatgaattggattgagagggggaagaagtggggaggaagaaattttgttttaaatgtttgttttttttttttttattttgtaatttattgattagtttttgttgggagatgggtgttttttatttgtgggaagggggtggggttttttttttgggttgtatgtggggagaggttgttttttttttttttttttgtttagttgtggggtttaagttttttttttttgtttgaaaggaggggaggggggatttgttgttataagttttgttttttgtgttatttagttttgttttgttgtgtttggttgttggttttttgggttatttgtgggtgggttttttttttttttttttgtgttttgtgtttttggggttttattgttttttgtgttgtggttgtgtttgtgttttgggggtagggggtgtagaatggtgttttttttttttttttggttttggggtttgtatgggagaattttttttttatgatgttgttgggtgatgtggtgtgggggtagggggatggtgggggagtttttgtttttgatttttggttggtttttttgttttaggtgttatttagtgattatgggtaaagagaattgttttaaaaagtttttttgttgattgattttttttttgtggggggggggggggttgtttaattaattattttgagttaggagtttaggttttttattttttaagtttaggtttaggtttttagattttatttgtattttttgatgttttgagatttttagattttatgtttgataatgaggttttggggagtatgtttatttggagaaataaatatagtttgtggaaaggggttggaaggtagggggaggtatatttgtgttgtagttgagtgattgggttagggttttggtgtttttagtatgtttgttagggttttggagatgagaatgttagaagttagatagttggtgtttaaagtttattttaggatgtttagagattattaatttgtttattttatggatggggaaatggagttttagagttatttgataatttatagtgagataagtatttttttaaatggggtttttatatgttttttttttatatatttattgataaagggatgaggagaaatagttaatgtagttttttgtgggatagtagagaaaagaggtttgaggggtattgtatgagtaaaattaggtagttatttagtatagtgtgtgagattagtgttagttttatttttttttttttaatttttttttttaattgaattttttttattggattttttttttgttttgggtgattttgttttttagtagttttgtttttttgatttttatttgagttggttttgtttattaggttttaagtttgtattttaattttttatttatttttgttttttggttttagtaattttatttggtgttttttgagttaggttttggtttatgtgtttagagttttggttatgtttttttttttagttttgttttattagtttattgggttaggttttgtttttattaggatttattatgttgggtttggtattttttttaggtttttttagggttttgtttatgtttatttggagtgtagattgttttgtagattagtgggtagagatagtagaattgatagtgttggaggtggggatggggagagagagtgagtgtggggtgtggttgggggtggagttaggatggggttgggattagatttggattagaggttaggtttaggttaaggttggagttaggattgtttgtggagttaaggttgtattaggggtaaggggttgggttagaggttaggatttagggttgggggtttttagagggttttggtgtattttgaggtttagtggagttttgagtgtgaggtgaggttttatttggtattggttgtagtgtttatttatgttttttttattatagtgatagtttttatatttagtgtattgttggggattgggggagtttggttagatggaaattttaatgttatttgggaggtatttgtttttggtttatttttgtattttggatgtttttttagattttattttttttatttttaatattgagttttgtatttgttttttaaattagttttttttttttttttttgtttttggtttttttttttttttttttttttttttttttttttgaggtggagtttttttttgttgtttaggttggagtgtagtggtgtaattttagtttattgtaatttttgttttttgggtttaagtgatttttttgttttggttttttgagtagttgggattataggtgtgtgttattatgtttggttaatttttttgtattttttagtagaaatggggttttattgtgttagttaggatggttttgattttttgattttgtgttttgtttattttggttttttaaagtgttgagattataggtgtgagttattatatttggttttgtttttggttttttattttagggtgattttatgtttttttgttagggtgggtttaggtgttttttttatttgttttttgtttattttttttttagtttattagtttttgtgttattttttttttttttgattttttttgttatagatttttgtttttgtttttatattttaagatgtagtttgggttttgtttttttttttttggattattgttttagttttttagtttttagtttgtttttattttatatgtttgtagaaggatttttttttttttagaattgattttggtttgtttttgttttgagtttttttatagtattattttagggtttttgggatagattttggggatattttggtgggtggatttgggttggggatatatattgtagaaggagtagtagttatatagggattttggttggtagtttttatatttttgagtattttgtggatttgtggggataggagggtagtagtgatttaggttgatttggtttttttttatttatattagtttaggttatttatttgtgtttttattgtttttttttttgttggaggtatttttagtttttttttttttgtttagtgggttggggatgatggtgaagtggggtttatttttttttagtttttttttttttttttttttttttttgttgtggtttgggtttagtggggttttaattttagttttttttttttttttttttttgttttttttttttttttttttttttttgttttttttttttttttttttttggtttaggttgaggttatgatttttttttttattttttttatttttttggttttggttgttatgatgggtgtttttttttttttgttttgaatttttattgttttttttatgggagttggggttttttttttttttttttttttttttagaattatttttttttaaatggtttttatttttgattattgtgtgttttggggggtgatggtttatttttttgatggattttttttgattatggttagtttttttattttggtggttttgtttgtggttgggggtttggtggttaagtttagtagagatttttttatttttttttttggggattttgtggtggtgatggtgagggatttttgttttatatttattttggaagttttttttattatttttgtggttttgaggttggtggtttgtaatatagtggttgaattggattgtgattttttttttttttttttttttatttataaggttatggtggatatgttggggattttggtgttaatgtttagtggatatatttttatttttttttttgtttttgtggttttggtgtttgtggttagggatatgatggtggtgtttatttgagatagttttaatttttttttttttgtggttttggtgtttgtgggtttggtgtttatatttagtggagatattattattattattgttattttttttatggttttggtgtttgtggttggggttgtgatgatggtgtttatttgagatatttttattttttttaattttgtggttttggtgtttgtgagtttggtgtttatatttaatggagatattattattattattattattattattattattattattattgttattttttttatggttttggtgtttgtggttggggttatgatgatggtgtttatttgagatatttttattttttttatttttatggttttggtgtttgtgggtttggtgtttatatttagtggaggtttttttttttttttttttttttttttttttttttttttttttattattttttttattatggttttggtgtttatgtttgaggatatgatggtgatgtttattggatataattttatttttatttttgttttgatggttgtggtttttgtggttggggaggtggtgtttgtgtttagttgagttttttgtgtttttatttttgtggtttttgtgtttatgggtttgtttattatgttttgtaaagatttttttatttgagatatttttatttttgattttgtggttttgggatttgtggtttgggagtaggtgtttatattttttggagatatttttatttttttttttatggtttgggtggttttagaaatgatgtttattttttgtggaaatatttttgtttttatttggatggtttttagggttgtggaggtggtggtgaagttttgttgatgtttttttggagagtttggtgattttagtgttgttgttttggtttttgaagtttagtttattttttttgagttgttgggttatggttggggggaggagtaggttggttattttagtttagaggatagaagtgtgtagttatggtttatggtggtttatggggatggataggtagtattggttttagttgtttttgtggtaatgtggataaatgttggggtttttgtttttttggggttggtttttttttttttttgtgttttttttttgtttttttggtttttgtttatttttttttggtttttgttgtttggttttggatatttttttgaggttgtttttggagttttttgatttttttttggggttttttttttttattttttagttaatagggtttttttttttttttttttttagttaaatttatttttagttttgagttattttgggttagtttttgtttgtttgttttttgttttttttttttttagttggggaggggattagtgaggggtttttttttggttaggagatggtggttaagggatttgattttgaattattaataagtttatgtttggtagttgtaaagataaaggttagatttttagtaggtttttgggggagtttggggtatttgggggaggtagaagagatttattagaggggagagatttttgggatggaaggattgggggtttgattgtggggtgtttttagttggaatgatatgtgttggtgagagagtgatgttagtattgaggttttagaatggggggaaaggaatatggtttttaatatatgtgtttatgattttttgtttttggaatttagatttgggggtagggattgggttaggttagggttataaatatagttgggaggggtagggggatttaggttatggaggttatagttgtttttattatagagggttggtaggagataagtggttttgtttgtttttgtgtgttagtattttttattttttattttttatgattgtttttattagggtttttttttttgtttatgggtttttttttttttttaattttgttatttgtttttttagggtttttgttttttttttatgggattgttttttttttttattttgggtttttgttttatttttattttagtgttagtttttttttaagtttgtgttttttttttttttttaaatttttggttttttttttttgagtttttgttttttttttaattttttggtttttgtatttttttttgttttttgttttagttaaggtgttttttttttatttttggtatttatttttttgggtttttgtttttatttttttttagagtttttgtttttttttgttttagagtttttgtttatttttttttgggtttttgtttttttttttttgggtttttgtttttttttttttgggtttttgtttttttttttttgtggatttttgtttttttttttttgggtttttgtttttttttttttgtgggtttttgtttttttttttttgtggatttttgtttttttttttttgggtttttgtttttttttttttgtgggtttttgtttttttttttttttgggtttttgtttttttttttttgggtttttgttttttttttttagggtttttgtttttttttgttttagagtttttgtttttttttttttgggtttttgttttttttttttgggtttttgtatttttttttgtgggtttttgttttttttttttgggtttttgtttttttatttttgggtttttgtttttttttttttgggtttttgtttttttttttttgggtttttgtttttttttttttttgggtttttgtttttttttttttgggtttttgtttttttttttttgggtttttgtttttgtttttttgggtttttgtttttttttttttgggtttttgtttttttttttttttgggtttttgtttttttttttttgggtttttgtttttttttttttgggtttttgtttttgtttttttgggtttttgtttttttttttttgggtttttgtttttttttttttgggtttttgttttttttttttgggtttttgtttttttttttgtgggtttttgttttttttttttgggtttttgtttttttttttttgggtttttgtttttttttttttgggtttttgtttttttttttttgggtttttgtttttttttttttgggtttttgtttttttttttttgtgggtttttgttttattttttttgggtttttgttttattttttttgggtttttgttttttttttttgggtttttgtttttttttttttgtgggtttttgtttttttttttttttgtttatttttgggtttttgttgttttattttttgattttttgttttttaagtttttgtttttttttttttgggttaaattgttttttttttgtttggtatttttttttttgagtttgttttttttttgttattggtttttaattttttttgtttttattttgtgtttgtttttggagttttttttgtgtgtttttttttttttggtttggatttttgtattttttaggttgttgtttttttgtttttttattgtggtttgggatttgttttttttttgttttttgttttggtgtttttaagattttttgttttttagattttgttttgttttaggttaggttggaaagtggaggatttggtttgttttgggtgggtttggaagtagagttggtggagggagtgttggggttttgggttgtaggaggttgtggtggttgtggtagtatggtggtgttggagaaggagtaggtgagtgttggattagggtttgtgggagtgtggagttggggattttgtttttaggtttttagagaggagggtgttggatatttagatttttgggttagatggaggagggggatgggagggtttaggttttagggtttagggtatgggggttgagatttttgagtttggagtgggagggtgttgggggtttggatttttgtgtttgtggggagtgtatggggtgggtggttttgtgttttataggatagaattgggtgtttttttattttatttttatttttatatttgtttttgtttttagagttggatttttaagatttttaagaagaagatttgtatgatgtttatagttgattttatagatttggggtgaggagtttgtttttggattgattttagagggtttgtggtttgttgattttgtttgtggatggttatgttttagttttgttttttttttatttttggatttggggatttttttaagggtgttttttgttgatgttttttttttaggagtgtttgggtttgtgtagatattttttattttttatttgttatttttttgtttagggttagtgtagatgttttagggtttggttttgttttttttttttttgatgttttttttatgtgtttttgtttttttgtgttattttttgtgtttttgttttttttttttgggtatttttgttttatttatttatttatttatttatttatttatttatttatttatgtaagaaatttttatttagtgtttttaaggtttttttagtttaatttaatggttttgttagggttttaattttttttgggatatgtgttgtgtggttttgggtaaattattttatttttttgggttttgttttttatttgggtattaaaagaggtttgattttttggggttattatgagaattaaataagttaatgtttgtgatatttttggtatagtgtttagtataggatgttgggaaatatttgtagtttttattgggaggtggtaattattattgtgggtgggttttgttttggtggttggggatattaattgagttagatagggtgtgtgtgtttgtgaggagtttttgttttttagtgatggttttttaagtggatttaggttttttagtttttttttttttttttttttttttgagatggtgttttgttttgttttttaggttggagtgtagtggtgtgattttggtttattgtaagttttgttttttgggtttatgttgtttttttgttttagttttttgagtagttgggattataggtgtttgttattatgtttggttaattttttgtattttagtagagatggggttttattgtgttggttaggatgattttgattttttgattttgtgatttgtttgttttagttttttaaagtattgggattataggtgtgagttattgtgttgggttaattttttgtattttttttttagtagagatggggttgtattgtgttagttagatggttttgattttttgattttatgatttgttggttttggttttttaaagtgttaggattataggtgtgagttattgtatttggtttaggttttttagttttttgttttttgtttttttgagatagagtttggttttgttgtttaggttggagtgtagtgttgtgata

SEQ ID NO: 296 - DNA, 10664 bp, Artificial Sequence
  chemically treated genomic DNA (Homo sapiens)
tattgtaatattgtattttagtttgggtgatagagttagattttgttttaaaaaaataaaaaataaaaaattagaaagtttgggttaggtgtggtggtttatatttgtaattttagtgttttgggaggttgaggttggtggattatgaggttaggagattgagattatttggttaatatggtgtaattttgtttttattaaaaaaaaaatataaaaaattggtttagtgtgatggtttatgtttgtaattttagtattttgaggggttgaggtgggtggattataaggttaggagattgagattattttggttaatatggtgaaattttgtttttattaaaatataaaaaattagttgggtgtggtggtgggtgtttgtagttttagttatttgggaggttgaggtaggaaaatggtgtgaatttgggaggtggagtttgtagtgagttgagattgtgttattgtattttagtttgggggatagagtgagatattgttttaaaaaaaaaaaaaaaaaaaaaaaaattagaaagtttggatttgtttgagaggttgttattgaagggtgggagttttttgtggatgtatatattttatttagtttaattggtgtttttggttattaagatagggtttgtttgtggtaataattgttattttttagtgggagttgtagatattttttagtgttttgtgttgggtgttgtgttaggaatattataagtattaatttgtttaatttttataataattttaggagattaagttttttttgatgtttagatgagaaatgggatttagagaggtgaaatgatttgtttgaagttatatagtatgtgttttaggggaaattggaattttggtagggttgttgaattaggttaaagggattttgggagtgttgagtgagggttttttgtatggatggatgaatgaatgaatgaatgaatgaatgaatgaatgaaatagaaatatttaaaagggaaagatagagatatagaaagtgatatgaagagatagaagtatatagaagagatattggggaggaaagaagtagaattgagttttggagtgtttatattgattttgagtgggagaatggtgaatggggaatgaggggtgtttatatagatttaaatgtttttagagggagagtgttggtaaggaatgtttttgggaaggtttttgagtttaggaatggggaaggagtagggttggggtgtgattatttgtgggtggggttagtgggttgtggattttttggggttagtttaggggtgaattttttattttggatttgtggagttaattatgaatgttgtgtaggttttttttttgaagattttggggatttagttttggggataggaataaatgtaggggtggaagtggggtgagagggtatttagttttgttttatgggatatagagttatttattttgtgtgttttttatggatataggagtttgggtttttagtgtttttttgttttagatttaggagttttgatttttatgttttggattttggaatttggatttttttattttttttttttgtttgatttaggaatttgggtgtttagtgtttttttttttgggagtttggaggtgaggtttttagttttgtgtttttgtagattttggtttggtgtttatttgttttttttttggtattattatgttgttgtggttgttgtaattttttgtagtttagggttttggtgttttttttgttggttttgtttttagatttgtttagagtaaattggattttttattttttagtttagtttggggtggggtgaggtttggggggtggggagttttggagatgttaaagtgggaggtggggagagggtgggttttaggttgtgataaggggatagagggatagtgatttggggggtgtagaggtttgggttggggggagagagatatataggggagattttaagggtaagtgtgagatgggaatagaaggagttgggggttagtggtggagagggaatagatttagaaaggaggatgttagatagggaggggataatttaatttaaagagggggagataaagatttaggggatagagaattagaaggtggggtagtagggatttagggatagatagagagagagggggatagagatttatagagagagggggatagagatttagggagaggggatagagatttagagagagtgggatagagatttagagagagtgggatagagatttatagagagagggggatagagatttagggagaggaggatagagatttagagagggggggatagagatttagagagggggggatagagatttagggagggggggatagagatttagggagaggggatagagatttatggagagggggatagagatttagggagaggggatagagatttagagagagggggatagagatttagagagagggggatagagatttagagagatggggatagagatttagagagagggggatagagatttagagagaggggaatagagatttagagagagaggaggatagagatttagagagagggggatagagatttagagagatggggatagagatttagagagagggggatagagatttagagagaggggaatagagatttagagagagaggaggatagagatttagagagagggggatagagatttagagagggggggatagagatttagggatggggggatagagatttagggagaggggatagagatttatggagaggggtatagagatttagggagaggggatagagatttagagagagggggatagagattttgagatagagggggatagagattttgagagagggggatagagatttagagagaggggaatagagatttagagagagagggggatagagatttatagagagaggggaatagagatttagagagagggggatagagatttatagagagagggggatagagatttatagagagaggggaatagagatttagagagagggggatagagatttatagagagagggggatagagatttagggagagggggatagagatttagagagagggggatagagatttagggagaggtggatagagattttgagatagagggggatagagattttgagagagagtggggatagagatttagagaggtggatgttagagatggggaggagatattttgattgaggtaaggggtagagggggatgtaaaaattaaagaattgggggaagggtaggaatttagaaaggaggggttagagatttaggggagagagagggatatagatttgggggaggattgatattaagataagagtgggatagaagtttagagtgagagggagaggtaattttatggaggagggatagggattttgagagagtagatgatagaattgaagagagaggaggatttgtgaataggaaaggagattttagtgggggtagttatgaagggtgaggagtaggaaatattgatatatagagatgggtaaggttatttgttttttgttagttttttgtgatggggatagttgtggtttttgtaatttgagtttttttattttttttagttgtatttatagttttggtttagtttagtttttgtttttagatttgagttttagggataggaggttatgggtatgtgtgttgggggttatgtttttttttttttattttagggttttaatattgatattatttttttattagtatgtattattttagttggaaatattttgtaattgaatttttagtttttttgttttaggagttttttttttttgataagttttttttgttttttttaggtgttttaggtttttttaaaaatttgttaaaagtttagtttttgtttttgtagttgttaaatgtgagtttgttggtagtttaaagttaagttttttggttattgttttttggttagggagagattttttattggttttttttttagttgggaggaggaggagtaggaggtaggtaggtggggattgatttagaataatttagggttgagagtaaatttagttggagagaggggaggggaaggattttattggttggggaatggggagggagggttttagaggggggttagggggttttggagatagttttagaggggtgtttagagttaggtagtaaggattagaggaaggtggatagagattgaaaggataaaggagagatatagagaaaaaaagagattaattttaaagggataaagattttaatgtttgtttatattgttgtagaggtagttggagttagtgttgtttgtttgtttttatgggttattataggttatggttgtatgtttttgttttttgggttggggtggttagtttgtttttttttttggttatgatttagtagtttagaggggatgggttaggttttagaaattggaataatagtattggagttgttgggttttttgaggaggtattagtagagttttgttattatttttatagttttagagattatttagatgagaataaggatgtttttatagagaatgggtattatttttggagttatttagattgtgaaaaggaggatgaagatgtttttaaggaatatgggtatttatttttaggttataggttttaagattataaagttggagatgagggtgttttaggtgaggaggtttttgtagagtatggtgggtaggtttgtgggtatagaggttatgggagtgaagatatggaagatttagttgagtataggtattatttttttagttataggagttatagttattaagatgaggatgaggatgaagttgtgtttagtgagtattattattatatttttaggtatggatattgaggttatgatggggaagatgatgaaggagaagaggaggaggaggaggaggaggaggaagaggaggtttttattgagtatggatattaggtttataggtattgaggttatgggagtgaagaggatgaggatgttttagatggatattattattatggttttagttataggtattaaggttatgaagaagatgatgatgatgatgatgatgatgatgatgatgatgatgatgatgatgtttttattgaatatagatattaggtttataggtattaaggttatgggattgaagaggatgaagatgttttagatggatattattattgtgattttagttataggtattgaagttatgaagaagatgataatgatgatgatgatgtttttattgagtatggatattaggtttataggtattaagattatagaaaggaagaggttgaggttgttttaggtgaatattattattatgtttttgattataggtattaaggttatagagatgaggaagaagatgaggatgtgtttattgaatgttggtattagggtttttaatatgtttattatggttttgtagatgaggaagaggaagaagaggagattatagtttagtttggttattatgttgtaagttattaattttgaggttataagagtgatgaagaggatttttaagatgagtataaaatagaagttttttattattattattatagagtttttagggaggaagatgaggaggtttttgttgagtttggttattaggtttttagttataggtaaagttattaagatgaagaaattggttatggttaaagagggtttattaaagagatgagttattattttttaggatatatagtggttaaggatagaagttatttgaggaaggatgattttgaggaggaaaaggagaaggaagaggattttggtttttatgaggaagatgatgaaagtttagagtagggagagaaaggtatttattatggtagttgggattaggaagatgaggaggatgaggaggaaggttatggttttagtttgaattaggaggaggaagaagaggaagataaggaggaggaggaggaggaagaagatgaggagaggagggaagagagggttgaggttggggttttattgagtttagattatagtgaggaggaagaggaggaggaggaggggttggaggaagatgagttttgttttattattatttttaatttattggataggagagaggaggttggaggtgtttttagtgaggaggaaagtggtgaggatataggtaagtggtttgggttggtgtgggtgggaaggaattgagttagtttgggttattgttgtttttttgtttttgtaggtttataggatgtttaggagtatgggaattattagttagggtttttgtgtggttattgttttttttgtaatgtatgtttttagtttagatttatttattaaggtgtttttagaatttgttttaggggttttggggtggtgttgtgggagggtttagagtaagggtaggttagggttagttttgaaagaaaagagatttttttgtaggtatgtgaggtgaggatagattgaaggttgggaggttggggtagtggtttaggaaggagaggataagatttaagttgtattttggggtgtggggatagagataggggtttgtggtaaagagagttgggggaaggagggatggtataggggttgataggttagggggagaataggtagagagtgggtggagagagtatttgagtttattttgatagggagatatggggttgttttgagatagaaaattaggggtagggttgggtgtggtggtttatgtttgtaattttagtattttaagaggttagggtgggtggaatatgaggttaggagattgagattattttggttaatatggtgaaattttatttttattaaaaaatataaaaaaattagttgggtgtggtggtatgtatttgtaattttagttatttaggaggttgaggtaggagaattgtttgaatttgggagatggaggttgtagtgagttgaggttgtgttattgtattttagtttgggtgatagagagagattttgttttaagaaaaaaaaggaaaaaaagggaaaggaaggaaattaggggtaggggaggggaggggaggttggtttggggggtagatatagagtttagtgttagagataaagagggtagagtttggggaagtgtttagggtgtaggggtgggttaggggtgggtattttttaagtggtgttagagtttttatttaattaggtttttttggtttttagtgatgtattgaatgtgagagttgttattgtgatgaggagaatatgggtgagtattgtgattagtgttaggtgagattttattttatatttaaggttttattgggttttaggatgtattgggattttttgaggatttttagttttaaattttggtttttgatttaattttttatttttgatgtaattttgattttataagtgattttgattttaattttaatttagatttagtttttggtttgggtttggttttggttttattttaattttgtttttggttatgttttatgtttattttttttttttgtttttgtttttagtattgttagttttgttatttttgtttgttggtttgtgaaatggtttgtgttttaggtgagtatgggtggggttttggaaaaatttgaggaaggtgttgggtttagtgtggtgaattttggtgggggtggagtttggtttggtaggttggtggggtggggttaagaggggaggtgtggttaaggttttgagtatgtgggttggggtttggtttgaggaatattaggtggagttgttggagttaagggatagaaatgagtggagggttgagatgtgggtttagagtttaatgggtgaggttaatttaagtaggaattgaaggggtggggttattggagaatggaattatttagaatgaaaaaggggtttggtagaagggatttagttggaagaaggaattagggaaaaggaggtggagttagtattaattttgtatgttatattgagtggttgtttaattttgtttgtgtagtattttttaagttttttttttttgttgttttataggaagttatgttgattatttttttttgtttttttattagtaagtgtgtaaaaggggagtgtgtaaaagttttgtttagagaagtgtttgttttgttatgagttattagatgattttgggattttatttttttgtttatgaaatgggtaggttaatgatttttaagtgttttggggtgggttttgaatattagttgtttaatttttggtgtttttgtttttagggttttggtagatatgttggaaatgttggaattttgatttagttgtttgattgtgatgtaggtgtatttttttttgttttttaatttttttttatgagttatatttatttttttgaataaatgtgttttttgaaattttattgttagatgtggggtttgggaattttagggtattggggaatgtgggtagggtttagagatttggatttagatttgagggatgaggggtttggatttttggtttgaggtggttggttgaatagttttttttttttttgtaaaaaaaaaattagttaataaggaagttttttgaaatagttttttttatttgtgattattgagtgatgtttggggtggggaggttgattgagagttgggggtgagggtttttttattgtttttttgtttttatgttatgttgtttagtggtattgtggaaagaggatttttttatgtaaattttggagttagaggagaaggggaagtgttattttgtgttttttatttttggggtatggatatggttatagtatggggggtggtgaggttttggggatatgagatatgggggagggagaggggaatttgtttgtagatgatttgggggattggtgattggatgtggtggggtggagttgagtggtatagggggtgaggtttgtagtagtgagtttttttttttttttttttggatgaagaaggaagatttgggttttgtgattgggtaggaaaaaggggagggagtagtttttttttgtatgtggtttgggagggaagttttgttttttttttgtgggtaaaggatatttgttttttaatagaaattgattaataaattataaagtagagaaaaggaaagtggatgtttggggtgggatttttttttttttgtttttttttttttttagtttagtttatgtggtttggtttaggttttggttttgtgtgaggtgggtgtgtgtatttttgttggtttgtatagatggtttagtttttggtgtgagtttttttgtttgttttttttggtgaggttatagtttgggtaggagagggaatagtttagttttgggaagatttttttgtttgagtgaggttatttgtatgatgttgggtagtgtgtggagtagtgaagatttattgtgttgttttgtatttttaaggttgtttagtatggtttttatttggaggtttgtattagtaggaataggtttggattgaaatgttgtttgtttgggaatttttagaagtttggtttggagggagagtgagtagtggtttagtttggagtatttttttttttgtttttttttaggatttttttttttggatttttttttttgatgttataatgattgttgggttttatatgggttttttttttttttttgtagttaaggatttaaatttgtattgggtgagtttatttttgttttgggaagggggagtgggatttatttattttattttgatgggggagtttggaatgttggagtagtttattttttaggggtgggtgagaaaggattaggttattttagaatttggattattgaggtggtttatgttttattttagggaagtgaggaagggttgttgtatttgggagttttttattttttggttgtagtttgtggagagggagttttggagagtttagggtttttgttgtagttgaatgaaagttggggggtaatattttagttgagttgggagttatgttttggaggttttttttttggaatattttttgttaggatggggagtggttgaaagatttggtgttgttttaggtataggagttggatagttggtgagggatttttgttttgtttgattttgtttttttttttgattttatttttttttgggttttattttttttttaattttgttttttttttggttttgtttttaattgtgattattaatagttaggttttgtttttttagtttagttttttgaggagttgttgggagtagagttttttgagttgttgttgtgtttattttgtttagttgtttgtttgtgtttaaggagataaggttgttgaattttttttttagaagttgttgggtttggaaagaggaggtggagggggtggttggagtgtgtagtttgtgaggtggggatgtttagtatgttttgggtttagtggtagtttatttgtgtattttgtgtggggatttgtaggagtaaggttaggttggagtagttgaaggttttgtttagggtgagtagtgttttgtgtattttgttttttgtgaggtttgtggtaaatttttttaggtttagtttggatatttaatttatgatttgtttattggattatattattatgtttggggatggaagggatttttagttgtgttttttttgtggtttggagagtttagtttagtttatatttttatttttatttggtttttttgggttatgttttttatgt

SEQ ID NO: 297 - DNA, 22069 bp, Artificial Sequence
  chemically treated genomic DNA (Homo sapiens)
tattggtgttgtgagagaaattttgagtgttggttggtgagttaggtttagatggggttagatggggtggttgtattaggttaggttttttttaattttgaatttgatgttgggtagagaatagttttattattttgtagtttagggtgtagatttttgggtgggtgttttttgagagtttttttttaaaggtttttatgaagtttttaaggtgttttttttggttattttgtatgtgttgttgggggtggagaaggtaggtgagggtagttttggggtgtagtgggggtgggggtggtagtagtagtatatttttgagttttttgggattattttatttatttattatgtttatttattggttgggattttggtgagtaggtggggaagggggtttgttaagaagatatagggaggatggttttttaggatgggaagtggttagggatagggtttggggtttatgggtgttatgttttttgggtaatataagaaaggttgtttgggggtttagattttgagtttaggattgtgttgtgttttgagattttatattaatgatggggaggtagaagtttgttgagaataggtagaggggattgggatgttagggtttatttttgtgatttggtagttgatagagttggtggtagttgagtagtatatgtattgggttttttagtttttggttattgtaggggatatagatatatagttagggtttggttaggtttattttatagtttttggggtattgattatttgtatttattgagttttattagggagtgaggattgaggataggaggttttagttttttggtggagttggaagtagattaggttttggtagttgtgtggtagttaggatgtttaggtttggatttagggagattagtgttttttgtagaggttttttggtagtgttgttttgggtagtattttttaggtatttttgaggtgatggttttaggggttgttatagggttgtgtaaggttggttatgtgttttgagtgtggttgtgtggttgtttgggggattgaatagaattattaggttaagggtgggataagtttttttgtttttggggttagtaatttttatatttttatggattaagggtataggaaggtagggatatagggttttttaggtggtggtatttgaattttgttatgggaaagtttttgttttatttttgtataaagaataggtggagagaaaatgaggttaagggttagttttggttttgttaaagatggtgtagtttagggattttgagtgggatggagggtttgggtaaagttttattttagttttgggggttttaagggagggtttaggttttgggggttatgggtgggaaggggaaggatttgggtaaggttttattttggttttggtgtagttgtttttagtggtaataatattttttgttttggatgtagtggtttgaagaggatatgaggtatttggtgttatagtggtagtaggttttgtaggaagttgtgggtggggatttaggtggaagttgaggtttatgttggggtttgtatgtttggttttgtttatattttgtatttgtttatttaggttgttgtaggttagtgatttatagtttttgggttttttttttttagttgtgaagatgattgtgtttttgggttgttttgggtgtgggaaggggtagttgttttttttgagttggttttgggtgagtaggtattttttgaggtggttgtatagggtagtttttgtggataggtatagtggttagtttttgtttgggatggtttatggggtggtagatattattgggaaaggtggttgggttggtaggggtttatgaagtattgtgtggtatagtaggggttgggttggtagaggtttatgaagtattgtgtggtagagtaggggtagggttttattttttaggttttttatttgggggttgtttggatggttgagtgagaagttggttttggtggttaatttgttttttaatattattttgtgggatataattttgtggttattggtttttggaaggaagggagggaggggaggagggtgtgaagtagttggtttagatttttgttttgtttgtttttttatttattttgttttttttagatttttgttttaattttttttttttgggatagtattttattgattttgggttttagtttgatttgaataggagaggtagatatgtggtgagttagggatgtagggtagttgttagttttgtaggttttagagttgtatggaggttttatatttaaagtttttgttttttttttttaagtgaagggggaagggtggggagaatagtatgggggatttaatggtttttgagggttttgagtttttatgggttatttagtttgtgatgttaatttagggtttttttgagtgttaatgtaggtggggatgggggtaggggttggtgatagtttaatgtagtttggagaggttgtaatgaaatgtttaggtttttgttttttttttttttagagtttaatgtatggagtttgtttagttttgggttttttgttttgaagaagttgttgtagttttattagtaggtggttttttggtttggtttggagattttatttagtggaggaaggtggttgatagtgaggatattagggttaggtttgttttatatagaagtttgggaattaggtagtaggtagtttttttatagtattgtgttttttttttgtttgagattgtggttgagtttagggttgtgaaggttttagtgagggttttagtttagttgttattttaagagtaattttgagttttttttgtttatttgttaggatttattgttgaggttgggtatagtgttgggggttaggtttttgagttttttgagggtgtttatggttatatttaggtagatgtttttgttggggttgtggttataggttattttttttttgtttagtgtttgggggataggtggtgtttagttgaggttatgtttgtttggtgttggggagttttagtggtggggttgttatggggttggggatttgtattttttttaggtagttttgggttatagttgtggttgagaggttgggggatgtttggggattattttggatttttagtttttatttgattggttagataggaattttaggattttattttttttatggttttttggttggaggtatagaatttgagatattttttgatgaataggttgagatagtgttggtggatgatggtggggattttgtttttaaattttttggggataatgggtttttttaaattttagagggaaggtaaaagttgttatgggtgagggtttttataaggtttttagtggggaatgtagatgtgatgaggttgtgtttatggttggaggtaagagtgaggtgtgttgggatagattagtttggttgtagtagggatagatatgttaaggtaagataggagtagtaggggaaattgagggtagtggaattaaggttatgggaaattgaggttatgggggtataagggaatttgttgtattttttgtttaatttttttagaaatttaaagttgtttaaaaaatataaagtttattaattaaaaataaaataaggttaagtgtggtggtttatgtttataattttagtattttgggaggttgaggtaggaggattatttgaggataagagtttaagattagtttggataatgtggtaaaattttgtttttataaaataaaaaataaaattattagttggggtgtgatgatattggtttgtggttttagttatttaggaggttgaggtggaaggattatttgagtttaggaggttgaggttgtagtgagttatgattgtgtttttgtattttagtttgggtaatagagattttgtttttaaataaaaaaaaaaaatattaattaattaaaaaaataaaataagataaaataaaaaaatattgttagggtggttgggtatggtggtttatgtttgtaattttagtattttgggaggttgaggtgggtggattatgaggttagaagattgagattattttggttaatatggtgaaattttgtttttattaaaaatataaaaatagttaggtgtggtggtgggtgtttgtagttttagttatttaggaggttgaggttagagaatggtgtgaatttaggaagtagagtttgtagtgagttaagattgtgttattgtattttagtttgggtgatagagtgagattttattttaaaaaaaaaaaaaaaatattaaggtatggggagggaaggtgaaggttgtattgtggtgtggagtatgaaggtttgtagggtaggggtgaggttggttttttgtaggttttatgtggttgggttttagggtgtggttttgggggtggtggttttggttgagatgggaggggttatttgtaaggatggattgtgggtgatttgtttagggatgatggtggtggtagttttggatgttatttttgataatgtgtgtgtttttagttgttggttatttggtttagggttgttggaggattggttgttgttggttgtaagggtttttttggtatttgtgggggttggtggggtatagggggtgtgggtatagggtgagtggttgtttattattatgtggtggagtattaggtagttgtggttgtttagtgttagtagtatgtgtatttttgtgtgtagggggttgggttagggtgaggggttggggttgtgtaatggtattaggttttagttgtttttaggtaagtttattgaggtagaggatataggttaggttgtggaggttgttgaggatatgttattggtggggtggtttaggtttttgttatgtgttttgattttaagtttaaggtgttgatgtttgagggaaaggttttggtttttggatagaggattgaagggttttgggtgtttttatttgtttattggttttgttttgttttgtggtttttgtgttttgttttgttttttgatgaagttataaattagagggaggaggttaggtttgtaggggttgttttggagggttggttatgtgggtagttgtaatttgggtatgtatgtttgtgtggtaggggggtttttggattgggggtttggtattgatttaggaaggggagttgtgagtagggatatttggttttagttttagagtaatattttttgaaatgttatttggttttggaaggtgtaagggaggtaggatgagtttgtttatgttattgtgggttgtttagtaaggaagtaggttgtttgttaggttggtatgtgttttttgtagtggagggtttgttttttaggaatggatagagaatttttagatttttttggttgtatgttgggggtgagtttaggtagttataggagttttttaagttagatgagtttgttttgtggtattgttagtatttgggatgttagattttttttaggtggtgggttttaagggtattgtgatagtttagtatttattatagattagtaataggataatttgagtgtggagatatagatgggaagtgtgtggggttttgggataggtttaatttaatgattttttttttttggggttaaggttttagttgtgagggggttttggggaggggaggttagagtagtttggagagttttttttaaggagggttgtgggatttatgggatttgtaggggaattgttggggttggttttaaggttttttagttagtgttagggaggtaggggttttaaattagtaggttgtttagggtggtttttggatagtagttatgtttttttagggagtttgttagatatatagattttttttagtttttagattagaatttgtattttttaggagttttttgggggatttttatttgtgatttgtttttagggatatttttttgttttatagatattattgatgtgaagatgtaggagataggataattttttgtgaagggttttgtttatttattattgaggtttggtttgattttttataagattttgttgggggggaagtgttttttggagtaaaggaaatatagttttatttttgggaagatagtatttatttttattagaggttatgttttttatttatatgttaggagaaagttatatttgtagaagtttgttttttatttaatgttaggtattttgatatggttttttattttttggaattataggtttaggttttggtttagtttagtttttagtaggttgttggatttttagtaattttggagttgggttagggaaggaaggtgttgggttaggttttttgtattttttaatagtttttattttatagataggtaggttgagggttttagggagggggtttaaagttattttatgagtaagtattatgtggtttaggtgagtttagagattttagggtgttattttttttgtttatatgtttatggttttttggtataggttttttgggttaggatttatttgtagttaggtgggggttggggatgtgggtgatttttttttttttgttaggggtggaaatgtggatggagggtgatttttttgttagtttggtgggggtttgtagtaagtttgttgatgttttttgtgtttgttgggtttgtaggtagtatattttttgtgttgttgggggttgggttgggggtattgtgggatttttttttgggggttttatttgtgttattataaatgttaaggtttggtagtatagtgggggtatttggagtaggtgattttgggtaggtttgggagagggtggttggagtttgggggttggaggtattatttttttggttgttttttgagttgttgggtatattggggggaagtagtagggggtagtggtttttaatgttatgtggttttaggtttttttatttttagtgttttttggtgtttaggttatgtttttagttttgataaggtatgggtgggtgggattattttgattatattggtattttaatttaattttattatgtttaattttttttaaagttttttttttggggaggttttgggattggagtaattgggatttttttggttgttgattttggagttaggttttttgtttgttttgtattattttgttatgtttgtataggggtttgataagtgttattgtttttgggttatagaggatattggagtttagagttggataattggtttaggtttaggttgtatatggtgtagtaggttgtttgttgtattttgggggaggttattttggggttgttgatttgttttgttttttgttttagtattgtggtaatttaataggaaggggtagggttagttttttttggaatttgggtagtgttaaagataaggtgtttttaaaaagtttatggaaaatgtgtgttgtgatgaaatttgtatggtttttaagtttttttgttttaaaataaattgatattaatttgttataatatgtttgaattagatggagtttgaggtattaaaaaaaagtaagatattagttagaatagagttttagttagagtaataggagttttgttaaaattgaagtaaatgttaagtattaaatttatggtaaaatttgggtggaagaatgaatggggaaattattgatgttttataaaaagtgttatagatttataggaataatgttttaaagaaattagaagtttatgaatggataatttattttatgtatttatttttttgagatagagttttgttttgttgtttaggttggagtgtaatggtatgattttggtttattgaattttttattttttgggtttaagtaatttttttgttttagttttttgagtagttgggattataggtgtgtgttattgtgtttagttaatattttgtatttttagtagagatggggttttattatgttggttaggttggttttgaatttttgattttgtgatttgtttatttttgggtgtagtgttttatgtttgtaattttagtattttgggaggttgaggtaggtagattatgagattagtttggttaatatggtgaaattttgtttttattaaagatataaaaattagtttggtgtggtggtgggtatttgtaattttaggtatttgggaggttgaagtaggaaaattatttaagtttgggaggtggaagttgtagtgagtagagattgtgttattgtattttagtttgggtaatagagtgagattttgttttaaaaaaaaaaaaaaaaaaaaaaataattaaaaaataaataaatagaaaatagagggatgaagttgggagtagtggtttatgtttgtaattttaatgttgggaagttgaggtaggaggattatttgaggttaggagttggaagattagtttgggtgataaagtaagattttttttttttataattttttttttttgagatagagttttgttttattatttaggttggagtgtagtggtgtaattttggtttattgtaatttttgttttttgagtttaagtgatttttttgttttagtttttttagtagttggtattataggtatttattattatgtttagttaatttttgtatttttagtatagatggggttttgttatgttggttaggttggttttgaatttttggttttaggtgatttatttgttttggttttttaaagtgttgggattataggtgtgagttattaaattaggttaattttgtttttaaaaaaaaaaaaaaaaaaggtttttgttggtttggtttttgtggattttattttttggttttgtttggaaaggtgggagattttttttttttgtttggggaatagagtggttagatttgaaagttttttttttttattttttttttttttggggggttaagatatatgtttgtttgttagtataggtttgtttttgttgttaatattaatatattttaattttaaattgtttttggtaagtggggaatggaatagtttagtttttaggtatagtagttgagggtttagggttaatagtttttgggttttgtgtgggtgtagttggaggggtgggtaggtgttatatgttttgtagatgtttaaggttattttttttgggtatttagggttttagtttggagattttagggttgtagaatgaaagtatattgggaaagtgaggttattttgggttgaattagttgttgtgggttgagtatttgggtttagtttgtgtggagtgagttttttttggtggttaatttggggatatggggttaggagatttaggggtttagggttggtttaggagagtaagagtttgttatgttgggagtagggaggagggaggggaggagaaaggagttggaggggatgaggaggaggtaaggagaggagatagaggagttggaagagaagagatagagatgggggaagggaggaggggagaagagagggggaagggaggaaaggggaggtgaggggagaggggttagaagggtgtgttggaggtggatttttttgaggtgggtgggtgggttaatatttttttgttagttagtgggaatagattgtgtgtatgtggttatagaagtttggttggtggttatgggttagtgatttttgggtgggtgaggggtaataggagtaatagggttgtttgggtgtttttgagtttttgagattttaatgggtttagggattagtattgaggagttgtttttattttgtgtttttgagttaattggaaattattttagatagaaggttttttattaggtttttggttttgtttttgtttgagtttagttttagtatttgtgtgttttatttgttgggttagttggtttttgttttttgttttgatgttggtggatttgttgaagatttgtaggtatttttttatggggttggagttaaagtttatttttttttttagggttgagtagtttatatttgtttttgtgttggaggtggaggaggaggaggaggaggaggaggatggggtgggggaggggggtggggaggttttgagttgtttgggtggtttttgtgtttttgggaagtttaggttggagtttgagttggagtttgagtttgagttgaggttggggagggtagagggttatatgtttggtatttttggttttgtggttttgtttttatttttgtttttaaagaggttggtgtggtttagggtttgtttttttagtttgggggtgttttgggaggtgtttttgtttagtgagtgggttttttgttttattagtttttttgatggggttttggtgttttttttgttgggtagttggagggggtggggtgggtttttgttggttgttggttgggagtttttgtttgtggggtttggttgttgtgttggttggttaggtttttttttttttgaggtggttataggagtggttgaagatggtttttttttggttttttttggttgttttgttttgtgttgggggttgttggtttgtgggttttttttgtttgtatggggtttttttataggttgtttttggtttttgtttttggttttgttttttttttgggttttgtttttgtagttgggggtaggtggggttttggtttttttttttttgggttttttttttttggggtagtttttattttgtgaggattggatttgggttggggaggtgggtttggttgggggtggttggaggttttttatgttgtattgtatggttgtttttttggttttttgtaggttgttttttttggtttttaggttttttttggagggtggttgtttggtggttttgattttagggttggttttggttttgggggtgttggttgtggtgggtttgttatttgggattgtggtggttttattttttgagtttgagaattttgtattgtaattgttaaaggggttatagagttttttgggagtaggtgtgtagggtttattgttgtgggagttttggggttgtttggtggtttgtttattttgggagttggttttgttgaggtgttgggttgagtagttggagagagggttatattttaggtttgtgggtggtttggagttgtttattatgtatttgttattgggaatggggtggttgtgttgttggggttggtttatagttttggggatgtattttagggtattgttattttttttatttttgttttgatttttgtttagggatgttagtgagtatttgttgtttggtttggtaggggtggttagtggggtgggttggtagttggtattagggtttaataggttgtggttgttggggttgtagttgaaggttagtgggaaggtatttttgtttgggtttatagtggggttggtgttggggttgtggggtgttagggtgggggttttggtggagtggtgtttatgggttgtttttagtagtttttggtagtgttgttgttttagttttattttattgtgtatggttttgatggtttggttgattagttttaattttagtatatttgggtgtggttttttttttaggtttagggtgttattttttttttgtgtggggggtttgggtagtttagggttgtaggggttgtaatttagttttgaagggaatagagagtatagttgtgattagtttgttggagaggagtttgtagtatgggggtggttttggttttaaattgtagggaagggaagagatttgtttttgaaatttattatgtattggtgtttgttaaggttttggggtgtttagttgggtataggttatggtgttattttaggttttgtgttgggttttgttttgttttgattaatgggtgttggatgggtttgggttgtgtgatatatagttttttgggtattggaggtttttttatatggtttatgaaatgtgtataatgattatggtggggtggatatttgataggttggaattttttggggtaggtgggtgtggagtttttagtatttagggtgttgggttgaggtaggattgggttgggttgataattatagtttgatggtggatataggagagtttttttttagttaatatggttttatttagttagtagtgtgtttgtggtgtggtggaggtgtgttagtagtgtgttagtggtggtgtggtggtggtgtgtttgtggtgatgtggttgagtagggttgggggatggggatatgtttagttgatgggttattttgtaaaatttataggaagattttttttttttgagatagtttttttgttgtttaagttggagtatagtggtgtgattttggtttattgtagtttttattttttgagtttaagtaaattttttgttttagttttttaagtagttgggattataggtgtgtgttattatatttagttaatttttgtatttttagtagagatggggttttattatgttggttagttttgaatttttgattttaagtgatttattgtatttggtttattttaaattaattttttaattttaaaattttttgtagttgggtgtggtggtgtatgtttgtaattttaatattttgggaggttaaggtgggtggattatttgaggttgggagtttaagattagttagattgatatggagaaattttgtttttattaaaaatataaaattagttgggtgtggtggtgtatgtttgtaattttagttatttaggaggttgaggtaggagaattgtttgaatttgggaggtagaggttttggtgagttgagattatattattgtattttagtttgtgtgataagagtgaaattttgttttaataaaaaaaaatttgtagaggtggagttttattatattggttaggttggttttgaatttgtagatttaagtaatttttttattttagtttttaagatagttgggattatagtttaagttgttgtgtttggtttaaagtatatggttgaaatgtttttttggggggtagttgggaatatgagatttgtatgttatttatgtggttttagaatatagtgtagtagatttttataattttaatgttattaatgttagtatagaagttagaattatagaagttttttgtggggataggttgaaggagtttaaagaaaatatgagtaagtggagtttagtattttagtgaagtaataaaaattaagtttaaatatttattttagaaatttggaagttgattattagaaattttattgagtatggttaggtatagtggtttatgttgattattttagtattttgggaggttgaggtgggaggatattgtttgagtttaggagtttaagattagtttggatgatatagattttattttttaaaaaaatatttaaaaataagttgagtatggtgatgtatatttgtgtttttagttatgtgggaggttaaagtgggagaattatttgagtttaggggtttgaggttgtagtgagttaggattgtgtttttgtattttggtttggataataaaataagattttagtttttaaaaaaataaaataaagttttattgaatgtaattttgtaatatttttaaaggtttttaaaggttaataggtttgattttttggagttggtaggaaatggtgttaaagatgtttgtgttttaatttttggaatttgtagatggtatatttttttagatggtaaatggggttttagatggggtgaaattttttttgtttgttattgagggggttatggataggttgagattttgtagagtagttttgtaattattttatgtagttttaatattattatttttagatttggaatttttagaatttgtgttatagatagattgtatagggtaggtatagatgtgtttggtgtagtttttattgtaaaaatataataataaataatgtaggagatgatttagaagttgaaatgtaggttatttgtggttaagggggaggtgtgtgttttggagggatttttaagttatattgttatggggaagaagaggggtaaggaatgttgtatatttttatttttgaaaagtagttttataaatttagtgagattagattttaataaaggtgtatgggtttatattaagtttgtagttttatggggtatagtaaatgtaatttggtttttatttatgttgtatttaatattaattgtttaagagggatgtgaatgttgatatatatttttgataggttgataaggagttgtgatattatgtagtaaaaggtaatagttttatgggaatttgtttgtattaagatgttatttggttttgatttgattttgattgaatgtgtagtttgtttgaaggttgggttttaggtgtgttttttttatttagaaaatttgtttgttttttggtttatttggagattgatttttatagtgtgttaagatttttgtgtagagaaatggttggatgtagttaaggggaggtaggtataagattttttattgtgggtgatgtagagaatagtaatagaattggaggttttttttatggtttttatttatatttttttaagttttagtaggtataagaaagaaatggttggttttggttggttgtggtggtttatatttgtaattttagtattttgggaggttgaggtgggtggattatttgaggttaggagtttgagattagtttgattaataaggaaaaattttatttttattaaaaatataaaaaaattatttagttgtggtgatttatgtttgtaattttagttatttgggaggttgaggtaagagaattgtttgaatttgggaggtggaagttgtagtgagttaagattgagttattgtattttattttgggtaataagagtaaaattttattttaaaaaaaaaaaaaaaaaaaaaagaaagaaaaagaaaaagaaaaaaagaaatggttggttttttaagttgtttttttgagatatatttattagtagaataaaagtttttttaggtaagtttttattttaatttttgggatttgtggttaggttattttatttagttaatagattgtaggtgtgatttgaataaaggattttgagggtgggtgaatattttgtattatttgggaatttagtgtttttatagggttttttaaagagggaggtaggagggtgagagttagagagattggaaaaggttgtgttgtgggtttgaaggggaggaaggtgttttgagttgagggatgtaggtgtttttagatgttgggaaaggtgggtattgattttttttggaagtttttgggaggtttagttttgtttatagtttgatttgagtttagtgaggttgattttggattttttagtttagtgttgagagagagtgtgttgttttaaggtttatggggatgaatgtagttttattgggtgatgaaagtgtagtggaaaatagttgtttgttgtttgtatttgtgaaggtggaaggttttttttgtttttgggaattttgtagggatagtgggaggttgggatttggaggttgtagaggaggtgggaggaggtttggttatgggtagttgttgttttttttttgaaattatagtagtgttgtgtttatttttaaaattatatttagggattaggtatggtggtttatgtttgttattttagtatggtggtttatgtttgttattttaggtatggtggtttatgtttgttattttagtattttgggagattaaggtgggtagattattagtttaggagtttaagattattttggttaatatggtgaaattttatttttattaaaaatataaaattagttaggtatgggggtgtgtatttgtaattttagttattgaggaggttgaggtaggagaattgtttgaatttaggaggtagaggttgtagtgagttaagattatattattatattttagtttggtgatagagtaagattttgttttaaaaaaaaaaaaaaaaaaaaaaattatatttagtgttaggtttagtggtttatgtttgtaattttagtattttggaaggttaagatgagtagattgtttgagtttaagattagtttaggtaatatggtgagattttgtttttataaaaaaatataaaaaatgagttgggtgtgatggttgtatgtttgtggttttagttatttggaaggttgaggtgggaggattttttgagtttaagaggttaaggttttaatgagttgtgattatattattgtattttagtttgggtaatagagtaagattttgtttttaaaataaataaaattaagtagtatttagataagaggaaggatttgtgtgtttgttttggattatttggaattttgtgggattgtgtggagggttatgaggtatgggtaggtaggggaatattatatagaagttataggtttttttttgtttgtgttaggttatagttaaggtatttttaggaaatgttattttatgtgtttagtaggtgtagaggggtttattttggtattattttatagttaaggattttgggagttagtgagggtatttaattaggattagtaattgtggttgttagtttttttgtgtggggagggatagttgttaggttaggaggatgtttttggtagggaaatggttggttggggttgggtgttagtttttatttagggggagggttgtggaggttagtagtagtttaagggtgtttttttggtttattttattgggggaggttttggtttttttttgatttagttggttgtagagtatgttattttgttatttgtttggtgaatagggtaattagtgttagtttttttttagttttggaagtttggttgtttagtgatgtggaggggttaggttaaggttattgtggtgtgagttgtagagatttatgaaggggaggtgatagagtataattattgaggaggagtaaggttaggttagggagatattggtttttttttttaaggttttagttaatggggatgtagagaggaggaagagtttgtttaatgggaaggtttttttttttaggtaggggtgggtagtagtgagattgggttttaggagggtaggtgggggtggaggggattgaggtatttttaaggggttaaggataagggattttatttaggggtttttatttttttgttttggattttagggttttaagatatagtttgtaagattaatttagtttaggggagttaagagttataggtaatatatatattagttagtagatatttgtgagttttttttaaaggaaggaaatttagatttttggatattgtggattttgaaaggagagattatttttttaaaaggtgtttttggaaggttttggaaggaatagtatttgttttttaggagtggagttaggtttttaagtagagtgtaggataggtgataagggtttaatttgggggatgtgggtttgtttttttaattggaagtttgtgtgagtatttgttttgttgttttgtggagataggtattgtttaggttggagtgtagtggtattatgatggtttgttgaagttttgtttttttggttttagtgatttttttgttttagttttgtaagtagttgggattatttgtgtgtattattatatttagttaatttttttttttttttggtagagatgggggttttgttgtaattgtttaggttggttttaaatttttaagtttaagtggtttttttgttttggttttttaaagtattgtttgttttttaagggttgtgaaatttgttttagtttttagttaatagatgggaaagagtaggggtatttggaggttggagggtatattttgtagagggggttttagtatttttatttttgggtggaggttgttattatttttataaagattgtattaaaaagaaagtaggtatgttaggtgggtttgagaagattgagattaggatttgtattatggttttttttttttgtggttattgggtttttttattttgtagtttgtgatttattggtgttggaaggtagtattttggtttgggtgttttagttaggtttggaagttttatataggaagttgtttggggtttggttatggttgtttgtagtttagaatagggggtatggtgtgttgagtttttgaaaggttatttgaagttggtatatattattgtttttttggatttttttgttttattatgttttagagggttggatttgggtatttgttaggattggaaaggttttagggtggtatgtgtatgttgttaggtgttttgggagtttatttagggggttatatttaaaggttgagtttgggttaggtgtggtggtttatatttgtaatgttagtattttgggaggtggaggtgggaggattattgaggttaggagtttgaaattagtttggttaatatggtgaaattttatttttattaaaaaatataaaaaaaaattagttaggtttggtggtaggtgtttgtaattttagttagttgggaagttgaggtaggagaattatttaaatttgggaagtggaggttgtagtgagttgagaatgtattattgtattttaatttgggtgatagagttatatatgtatatatatatatatatatatatatatatatatatatataaatgaatgttgattttggaagtaggaggggtttgtttaggttttgttttatggttgggaattattttggataggagtaggtgggtttttttttggatgtggtttaggttagtttgtttttgggaaatatggtgaattggttgataggaaaagtttatttttagaggtttgggagttgtttttttttttttgttttattttaaggttaggattgggaggtattatttagttttagtggttttgagaggttataatgtttggttggttattttttttagtttttttagttagggtttagtttagggtaatgtagtttagttttgttttggtttaggagagagtttattttttatattatttattttgattgtattttttgagattagtgttttgtagttttgggatgggttggatgataaagatgatatttttttttagggttttaggtgtggggtttgggattagtattatttgtttaaggttattttttggtttttaaatttttttttggtttagaaattttttattttgggtatttatttttttttttgtttttattgtttttgttttattatatttaatttatttatatagttgttttgtttttagtaatggggagaatttggtatgagttttaattttatatggagattgaaaggtagtaaaaatgataagattatggagtatgaagattttaatttgaatttttagaatgttttttagtgagatttgtttaaatttttgtttttttttagttagtttattttaaagatgaggatatttagtgttagtgagagttggtagtttttagttttataaggagttttaggttttttttatttagatggggagatttagtggttttaaagaatttggtaggttggttggatatgatggtttatgtttgtaattttagtattgtaggaggttgagatgggtggattatttgaggttaggagtttgagattagtttggataataaggtaaaattttgtttttattaagaaaatataaattagttgggtgtggtggtaggtgtttatagttttagttatttgggaggttgagataggagaattatttgaatttgggaggtggagattgtggtgagttaagattatgttattgtattgtagtttgggtaatagagtaagattgttttaaaaaaaaaaaaaaaaaaaaaaaagaatttggtaggtttagtttttgttttggatattgtttggtgggtttgtagggtttttaatgtaattaggtattagtaggattggtttttttagtttaggtagtgggttttgtatgttggtttagaataggttaggtagagattttagatggaaatagatagttttttttgtttggggtttagttggataaaaaagataagtttgatattgtggtatgagataagtaagattatttttaatttagtttttgggggagttatttgggtggtttgaggttttgaaggtggagatagaagaggatatttttaaaatagttatagtggtagagaaggtatggggttgatttttgtgaagtgtaaggtaggggttggttgtgtttatgggagtgtttattttataatagattttttgggaagaggggtttggaggatagtatttttgaagtttattttttgtggatggtagagtaattataaggtttttataaatggttatatgtttattttgggggtttttgtttttggggttttttttttaatttttatagtgggatgttttttagttttatttttggatatgtgggtgtttggggttttttatgtatagtttattggatagataggaatttgttgtttagaggtaaagggattagtattttgtatttagaggaggttttatagtttttagattatatggggtagaaatagggttatttggagagggttttgaggaaaagtttagttagtgttgggggtttggatttttattatttagtagtttttaatattttttttgaaatttaaggtggtttagttttgttttattttttatattagattttatttaggttttagagtttgttgtggaggttgggttgtgtttgtagtagtggtatttggggtttattttattgtttttagggttttttttgatttttagggttgtgatttgagttttttttttgttttaaggtattgttttttttattttgatagtgtagtgtgtagtgttaggattgtttagtaggtggagttatatggtagggtttaggggagaaaaagaaaaaggttttggtttgattggggattattagttttgttttttggggtgttttgggtatttatttattttatggggtggttgtttttatatgttatgattggatgtgttgttgttttaaggtttatagtttgaggttaggggatagggatggtaattaggatagaggttattgttttttaaaataatgtagaaataggttgggtgtagtagtttatggttttaatttttgtgttttgggaggttgagtttaaggttgaggtaggtggatgatttgaggtgaggagtttgagattagtttggttaatatggggaaattttgtttttattaaaattataaaaaattagttgggtgtgggggtgtttataattttagttatttaggaggttgaggtaggagaattgtttgaatttggaaggtggagtttgtagtgagttgagatggtgttattgtattttagtttgggtaataagaatgaaattttattttaaaaaaaaaaaaaaaaattagttgggtgtggtggtttatatttgtaattttagtattttggaaagttgaagtgggtggattatttgaggttgggagtttgagattagtttgagtaatatgtagaaattttgtttttatttaaaaaaatataaaattagttagttgtggtggtatatgtttgtaattttaggtaattttatgtttgggtgtagtagtttatgtttgtaattttagttatttgggaggttgaggtaggagaattgtttgaatttgggaggtggatgttgtggtgagttgagattgtgatattgttttttagtttgggtgatagggtgagatttttttttaaaaaaaaaaaaaaattgaaatagaagggtataaatggtaaaggataagaattggtagggaggagttagtgggattttttttttttatgtttttttatttttgttaagagtttattttggttgtgagttatttttatggtttatatagagtaagttaagagtttagtttttagttgggtatggtagtttatgtttgtaattttagtatttgggaggataaggttggtggattttttgagtttaggagtttgagattagtttgggtaatatggtgaaattttgtgtttattaaaaatataaaaattagtagttgggtatggtggtttatgtttataattttagtattttggaaagttgaggtgggtggattgttttgagtttaggagtttgagattagtttgggtaatatggtgaaattttgtttttattaaaatataaaaaattagttgggtgtggtggtgtgtttttgtaattttagttatttgggaggttg

SEQ ID NO: 298 - DNA, 22069 bp, Artificial Sequence
  chemically treated genomic DNA (Homo sapiens)
tagttttttgagtagttgggattataggagtatgttgttatgtttagttaattttttgtattttagtagagatagagttttattgtgttgtttaggttggttttaaatttttgagtttaaggtagtttgtttgttttagttttttgaagtgttgggattataggtgtgagttattgtgtttagttgttgatttttgtatttttagtagatatagggttttattatgttgtttaggttggttttgaatttttgggtttaagagatttattagttttgtttttttaagtgttggggttataggtgtgagttattgtgtttggttgagagttggatttttaatttattttgtgtggattatgaaagtggtttatagttaaggtgggtttttggtagggatggagaggtatagggggagaaggttttgttggtttttttttgttggtttttgttttttgttatttgtatttttttgttttagtttttttttttttttgaaaaggagttttgttttgttatttaggttggagagtaatgttatgattttggtttattgtaatgtttgttttttgagtttaaatgatttttttgttttagttttttgagtagttgggattataggtgtgagttattgtgtttaggtatgggattatttgggattataggtatgtgttattatagttggttaattttgtatttttttaagtagagataggatttttgtatgttgtttaggttggttttgaatttttaattttaggtgatttgtttgttttgattttttaaagtgttgggattataggtgtgagttattatgtttagttggtttttttttttttttttgagatggagttttgtttttgttgtttaggttggagtgtggtggtgttattttagtttattgtagattttattttttgggtttaagtaatttttttgttttagttttttgagtagttggggttataggtatttttatatttggttaattttttgtagttttagtagggatggggtttttttatgttggttaggttggttttaaattttttattttaaattatttatttgttttggttttgggtttagttttttagagtgtggggattagagttgtgagttattgtgtttagtttgtttttatattgttttgaaaggtagtgatttttgttttggttattgtttttgttttttagttttgagttgtaagttttgggatagtagtgtgtttagttatggtatgtggggatggttgttttatgaggtgaataaatgtttaggatgttttagagagtagagttggtggtttttggttaggttgggattttttttttttttttttttggattttgttgtgtggttttatttgttgggtggttttggtattgtatattgtgttgttgaggtggggagggtggtgttttggagtagaggggaggtttggattgtagttttgggggttgaggagaattttgggggtagtggggtagattttaggtgttgttgttgtaggtatagtttagtttttatagtaagttttgagatttgggtggagtttggtgtggggggtggggtagagttgggttattttggattttagagagggtattggaagttgttgggtggtggaggtttaggtttttggtattggttggatttttttttgaagttttttttaggtgattttgtttttgttttgtgtggtttaggagttgtgggattttttttgggtgtagagtgttggtttttttgtttttgagtagtgggtttttatttgtttagtgggttgtgtatggagggttttgggtgtttgtatgtttaaggatggggttggaggatgttttattgtgagggttggaggggaggttttaggagtagggatttttagagtggatgtatggttatttgtggggattttatggttattttgttgtttgtaggaggtggattttaggggtgttgttttttagatttttttttttagagggtttgttatgggatgggtgtttttgtggatataattagtttttgttttgtgttttgtgagggttagttttgtgttttttttgttgttgtggttgttttgggaatgtttttttttgtttttatttttaaagttttaggttgtttagatggtttttttaggggttaggttgggggtagttttgtttattttatgttgtagtgttaggtttattttttttgtttagttaagttttaggtgggagggattgtttgtttttatttggggtttttgtttggtttgttttgggttagtatgtggggtttattgtttgggttggaggggttagttttgttgatgtttggttgtgttgagagttttgtgggtttattgaatggtgtttggagtaggggttgggtttgttgggtttttttttttttttttttttttttttgagatagttttgttttgttgtttaggttgtagtgtgatggtgtaattttggtttattgtagtttttgttttttgggtttaagtgatttttttgttttagttttttaagtagttgggattataggtgtttgttgttatgtttggttaatttgtgtttttttagtagagatggggttttattttattgtttaggttggttttgaatttttgattttaggtgatttatttgttttggttttttatagtgttgggattataggtatgagttattgtgtttagttagtttgttgggttttttagagttattgagtttttttgtttgggtgggaggggtttggggttttttgtggggttaggagttgttggtttttgttggtattgggtgtttttatttttgaaatgggttgattgagagaagataggagtttggatgggttttattagagaatgttttggaagtttaggttgggatttttgtgttttatgattttgttatttttgttgttttttagtttttgtgtggggttggagtttatgttaggttttttttattgttggggataggatagttgtgtgggtggattgagtgtggtggggtgggggtagtgggagtagagaggagagtggatgtttagggtgaggggtttttgggttaagggaaggtttgggggttaggagatggttttgggtagatagtgttggttttaggttttatatttagaattttgggaagaaatattatttttgttatttagtttgttttggggttgtagggtattggttttaggagatgtggttaggatgggtggtgtagggagtgggtttttttttaggttgggataaggttgggttgtgttgttttgggttgagttttggttggagaggttggggaagatagttagttaggtgttgtggttttttaggattattggggttgggtggtattttttagttttggttttggggtgaagtagggaggaaggggtagtttttaggtttttggaggtaggttttttttgttagttaatttattatgttttttagaaatagattgatttgggttatatttaggaaggagtttatttgtttttatttaaagtaatttttagttgtgggatggggtttggatgggttttttttatttttagagttggtatttatttatgtatgtgtgtgtgtatgtatgtatgtatgtgtgtatgtatgtatagttttgttgtttaggttggagtgtagtggtgtgtttttggtttattgtaatttttattttttaggtttaggtgatttttttgttttagttttttgattagttgggattataggtgtttgttattaggtttggttaatttttttttgtattttttagtagaggtggagttttattatgttggttaggttggttttgaatttttgattttggtgatttttttgtttttgttttttaaagtgttagtattataagtgtgagttattatgtttggtttaaatttggtttttagatgtgattttttgggtgggtttttagggtatttagtagtatgtatatgttattttggggtttttttagttttgataggtatttagatttaattttttgaggtatggtgggatagggaggtttagggaggtagtggtgtgtattagttttaggtgattttttaggggtttagtatgttgtattttttgttttgagttgtaggtagttatggttgagttttaggtaattttttgtgtgaaatttttagatttggttggagtgtttaggttaggatgttgttttttagtattagtgggttataggttgtagggtgggggagtttagtgattatagggaggagaggttgtggtgtagattttgattttagtttttttggatttgtttagtatgtttgttttttttttggtgtagtttttgtggaggtggtagtagtttttatttgggagtgaaaatgttgaaattttttttgtagagtgtgttttttggtttttaggtgtttttgtttttttttatttgttggttaaaggttggggtaggttttatagtttttaaaagataagtagtgttttgggaggttgaggtgagaagattgtttgagtttagaagtttgagattagtttgggtaattatagtgagatttttgtttttattaaaaaaagaaaagaattagttggatgtggtggtgtatgtaggtggttttagttatttgtgaggttgaggtgggaggattgttggagttggggaggtaaagttttagtgagttattatggtattattgtattttagtttgggtaatgtttgtttttataaaataataaaataagtatttatataggtttttagttagaaagataagtttatgttttttagattggatttttattatttgttttgtgttttgtttgggggtttggttttatttttgggaggtaggtgttattttttttaagattttttaaaagtattttttggggaaatggtttttttttttagagtttataatgtttagaggtttgaattttttttttttgggaagggtttgtgggtgtttgttggttggtgtgtgtattgtttgtgatttttggtttttttgggttgggttgattttgtaggttgtgttttagagttttggggtttaggataaggaggtggaagtttttgagtggagttttttatttttagttttttagagatgttttagttttttttatttttgtttgtttttttggggtttagttttattgttgtttatttttgtttggggaggagagtttttttgttaggtgggtttttttttttttttgtatttttgttagttggagttttgggaggggagattagtgtttttttgatttggttttgtttttttttagtaattgtgttttgttattttttttttatgaatttttgtagtttatgttatagtggttttggtttggtttttttatgttattgggtagttgggtttttggggttgggggagggttggtattagttgttttgtttattaggtgggtggtagggtggtgtgttttgtagttggttgggttagggaggagttggagttttttttagtgaagtgggttgggagggtgtttttgagttgttgttggtttttgtagttttttttttgggtgggggttgatatttagttttagttggttgtttttttgttgggagtatttttttggtttggtagttgtttttttttgtatagaggaattggtagttatagttgttgattttagttgggtgtttttgttgatttttagggtttttggttgtgagatggtgttagaatgggtttttttgtgtttgttgggtatatggggtgatgttttttggaaatgttttggttgtagtttggtataggtaaagaagaatttgtggtttttgtgtgatgtttttttgtttgtttgtattttgtggttttttatatagttttgtggagttttgagtggtttaaaatagatatatggatttttttttttgtttaaatgttatttaattttatttgttttagagataggattttgttttgttgtttaggttggaatgtggtggtgtgattatagtttattgaagttttgattttttaggtttaagagatttttttattttagttttttaagtagttgggattataggtatgtaattattatatttagtttattttttgtatttttttgtagagatggggttttgttgtgttgtttaggttggttttgaatttaagtagtttgtttattttggttttttaaagtgttgggattataggtgtgagttattgagtttggtattaagtgtaatttttttttttttttttttttttgagatagagttttgttttgttgttaggttggagtgtagtggtgtgattttggtttattgtaatttttgttttttgggtttaagtgatttttttgttttagtttttttagtagttgggattataggtgtatgtttttatgtttggttaattttgtatttttagtagagatggggttttattatgttggttaggatggttttgaatttttgagttggtgatttgtttgttttggttttttaaagtgttgggatgataggtgtgagttattgtgtttgggatgataggtgtgagttattgtgttgggatgataggtgtgagttattgtgtttggtttttaaatgtaattttaaagatgggtataatattgttgtgattttaagggaaaggtggtagttgtttgtgattaggtttttttttattttttttgtagtttttgggttttggttttttgttgtttttgtagggtttttgggaataggaggggttttttgtttttgtaggtataggtagtgggtagttgttttttattgtatttttattatttggtgaggttgtatttgtttttgtgggttttaaagtagtatatttttttttagtgttgggttgggaagtttaaagttagttttgttgggtttaagttaagttgtgggtaggattgggttttttgaaggtttttggggagagttagtgtttgttttttttagtatttggaggtatttgtattttttggtttagggtgttttttttttttttaaatttatagtatagttttttttagtttttttgatttttatttttttgtttttttttttaaaggattttgtgaggatattgggtttttggataatgtaagatgtttatttatttttagggttttttgtttaagttgtatttgtagtttattggttgagtgaggtggtttggttataggttttagggattaggatggggatttatttggggaggtttttgttttgttggtgggtgtgttttgggggagtagtttgggaaattagttattttttttttttttttttttttttttttttttttttttttttttttttttgagatggagttttgtttttgttgtttaggatagagtgtaatggtttaattttggtttattgtaatttttgttttttaggtttaagtgatttttttgttttagttttttgagtagttgggattataggtatgggttattatggttgggtaatttttttgtatttttagtagagatggggtttttttttgttggttaggttggttttgaatttttgattttaggtgatttgtttgttttagttttttaaagtgttgggattataggtgtgagttattataattggttgaaattagttattttttttttatgtttgttggggtttgagggggtgtgggtgggggttataggggaagtttttagttttgttgttgttttttgtgttgtttatagtgggaggttttgtgtttgtttttttttggttgtgtttagttatttttttgtatggaagttttagtatgttgtgggggttgatttttaggtgggttgaagggtaggtaggttttttgagtggaagaaatatatttgaggtttgatttttagataagttgtatgtttagttagaattaagttagagttaagtggtgttttggtgtgggtaggtttttatggggttgttgttttttgttatatggtgttatagttttttattagtttgttggggatgtgtgttagtatttatgttttttttgggtagttggtgttgggtgtagtataaatgaaggttagattgtatttgttgtattttatgggattgtgggtttggtgtgggtttgtgtgtttttgttggaatttgattttattgggtttgtggagttgttttttaaaggtgagagtgtgtaatattttttgtttttttttttttttatagtagtgtgatttggaggtttttttagggtgtatgttttttttttaattataggtgatttgtgttttggtttttaggttattttttgtgttatttattgttgtgtttttgtagtgaaggttgtattagatgtatttgtatttgttttgtgtggtttgtttgtggtatgggttttgaggattttgagtttgaaggtggtggtgttgaagttgtatgggatggttgtgaaattgttttgtaagattttggtttgtttatggtttttttagtgatgggtaagggagattttattttatttagagttttatttgttatttaaggggatatattatttataggttttaggaattaggatgtagatgtttttggtgttattttttgttaattttagaggattagatttgttgatttttagagatttttagagatgttatggaattatatttagtggaattttattttatttttttaagagttggggttttgttttgttgtttaggttagagtgtagaggtataattttggtttgttgtagttttaagtttttgggtttaagtgatttttttattttagttttttatatagttaggagtataggtgtgtattattatgtttagtttatttttaagtatttttttaagagatgggatttgtgttatttaggttggttttaaatttttgagtttaagtagtatttttttgttttagttttttaaagtgttgagatgattggtgtgagttattgtgtttggttgtgtttagtagaatttttaatggttaatttttaagtttttggagtaaatatttgaatttggtttttattgttttgttggaatattgggttttatttgtttatgttttttttagatttttttggtttgtttttatgggaggtttttgtggttttgatttttgtgttgatgttggtggtattgaggttgtgagggtttgttatattatgttttggaattatgtaaataatatgtgagttttatgtttttagttgttttttgggaagatattttagttgtgtgttttaagttaggtatagtagtttgggttatagttttagttattttggaggttgaggtgggaggattgtttgagtttatgagtttaaagttagtttggttaatatggtgagattttatttttataaatttttttttgttgagatggggttttatttttgttgtgtaggttggagtgtaatggtgtgattttggtttattgaaatttttgttttttaggtttaagtgatttttttgttttagttttttgagtagttgggattataggtatgtgttattatgtttggttaattttgtatttttagtagagatggggtttttttatgttggtttggttggttttgaatttttgattttaggtgatttgtttgttttggttttttaaaatgttgggattataggtgtgtgttattgtgtttagttataaaaagttttgaaattaaaaaattaatttaaagtaggttaggtgtagtggattatttgaggttaggagtttgagattggttaatatggtgaaattttatttttattaaaaatataaaaattagttgggtgtgatggtgtatgtttgtaattttagttatttggggggttgaggtaggaggtttgtttgaatttgggagatagaggttgtggtgagttaagattgtattattatattttagtttgggtagtagagagattgttttaaaaaaaaaaaatttttttgtggattttgtagggtggtttattaattgggtatgtttttattttttggttttgtttagttatattattgtaggtatattgttattatattattgttggtatattgttggtatatttttgttatattgtgggtatattgttggttgggtggggttgtgttggttgaggaagggtttttttgtgtttattgttaggttgtggttgttggtttagtttagttttgttttagtttggtattttgaatgttgggagttttatatttgtttgttttggggagttttagtttgttgagtgtttattttattatggttattgtgtgtattttatgagttgtgtgagggagtttttagtatttagggagttgtgtgttatgtagtttaggtttatttagtgtttattggttagggtaaggtggggtttggtatagggtttgagatggtgttatggtttgtatttagttgggtattttagagttttggtgggtgttagtgtgtggtgggttttggaggtaggtttttttttttttttgtagtttgagattggggttgtttttatgttgtgggtttttttttggtaggttggttatagttgtgttttttgttttttttagggttgggttatgatttttataattttgagttgtttaagttttttgtgtagagggagaatggtattttgggtttgggggaggagttgtgtttggatgtgttggagttggagttggttaattaggttattgaggttgtgtgtagtgaggtggagttggagtagtggtgttattgggagttgttggagatgatttgtgagtattgttttgttgaggtttttgttttggtgttttgtggttttaatgttagttttattgtgggtttggatgaggatgtttttttattggtttttgattatagttttggtagttatggtttattaagttttgatgttggttattagtttattttattggttgtttttgttgagttgggtagtaagtatttgttggtgtttttggataggggttagggtagaggtggagggggtggtggtgttttggaatatgtttttaaggttgtgagttagttttggtggtatagttgttttgtttttagtggtaagtatgtggtggataattttaggttatttatagatttggagtatgattttttttttaattatttggtttggtattttagtagggttagtttttgggatgagtgggttgttaagtggttttggggtttttgtggtagtgagttttatatatttgtttttaagaagttttgtgatttttttggtagttgtgatgtaaggtttttagatttagaagatgaggttgttatggttttaggtaatgagtttattatggttagtatttttaaagttagggttgattttgagattaaggttattgggtagttattttttaaagagggtttggaggttgaggggggtggtttgtgggagattaaggagatggttgtgtagtgtgatgtgggggatttttagttgtttttagttaagtttgtttttttagtttaggtttagtttttataggatgggggttgttttaaggagggaaaatttaagaagaaaaaaattggggttttatttgtttttagttgtaaagatggggtttaggggaaggataagattaaggataagggttgagggtggtttgtggagaagttttgtgtggataagaagggtttgtaggttagtagtttttggtgtaaggtagagtggttggaagggattaagaagaagttatttttggttatttttgtggttattttagggaaagggaggtttgattggttagtgtggtggttgagttttataagtggggatttttgattggtggttggtagaggtttattttgttttttttagttgtttgataggaagagtattaaggttttgttggggaagttagtggagtggaaagtttgtttattagatgagggtgttttttaggatgtttttaagttgaagaagtgggttttgagttatgttgatttttttggggatgagagtgaggatgaggttgtagggttaggggtgttgagtgtgtggttttttgttttttttagttttagtttggatttagattttgatttagattttagtttgggttttttggaggtgtaggggttgtttaagtggtttaaggtttttttgttttttttttttgttttatttttttttttttttttttttttttttatttttagtgtgggggtggatgtggattatttggttttggagaaggaggtggattttgattttgattttatggaggagtgtttgtggatttttaatgagtttattagtgttaagatggaggatagaggttggttggtttggtaggtgaggtgtgtgggtgttggggttgggtttgggtagaggtagagttgagggtttggtgagagattttttatttggagtggtttttagttggtttggaggtatggggtggaggtagttttttagtgttggtttttgagtttgttgaaattttaggagtttaggagtatttgggtagttttgttgtttttgttgttttttatttatttagaggttattggtttgtggttattagttaggtttttgtggttatgtgtatatggtttgtttttattgattggtagggggatattggtttatttatttattttaggggaatttatttttggtatatttttttagtttttttttttttgtttttttttttttttttttttttttttttttttttttttttttttttttatttttgtttttttttttttagtttttttgttttttttttttgttttttttttattttttttggttttttttttttttttttttttttttttatttttagtgtggtgagtttttgtttttttgggttagttttggatttttgggttttttggttttgtgtttttaaattggttattagggggagtttattttatatagattgagtttaagtgtttagtttgtagtagttggtttggtttaaggtggttttgtttttttagtgtgtttttattttgtagttttggggtttttaagttggggttttgggtgtttaggagaggtagttttgggtatttgtagaatgtgtgatatttgtttatttttttgattgtatttatataaagtttagggattgttggttttgagtttttagttgttgtgtttgggggttggattgttttattttttatttgttgggggtagtttgaggttggggtgtgttggtgttggtagtgagggtagatttgtgttgatggatggatatgtgttttagttttttaaggaagagaagagtgaggagaaggggtttttgggtttgattattttgttttttgggtagaagaggaggattttttatttttttaagtaaggttaggaggtaaggtttgtagaggttaggttagtaggagttttttttttttttttttttaaagatgaggttggtttggtttggtggtttatgtttgtaattttagtattttgggaggttaaggtgggtggattatttgaggttaggagtttgagattagtttggttagtatggtaaaattttatttgtattaaaaatataaaaattagttgggtatggtgatgggtgtttgtaatattagttattagagaggttgaggtaggagaattgtttgaatttaggaggtagaggttatagtgagttaagattgtattattgtattttagtttgggtgatagagtaagattttgttttaaaaaaaaaaaattataaaaaaagggggttttgttttgttatttaggttggttttttaatttttgattttaagtgatttttttgttttggttttttagtgttgggattataggtgtgagttattgtttttagttttatttttttgttttttgtttgtttgttttttggttgtttttttttttttttttttttttgagatggagttttgttttgttatttaggttggagtgtagtggtatgatttttgtttattgtaatttttgttttttgggtttaagtgatttttttgttttagttttttgagtatttgggattataggtgtttattattatattaggttaatttttgtatttttagtagagatggggttttattatgttggttagattggttttgtgatttgtttattttggttttttaaaatgttgggattataagtatgaggtattgtgtttagaggtgggtagattatgaggttaggagtttgagattagtttggttaatatggtgaaattttgtttttattaaagatataaaatattagttgggtgtggtggtatgtatttgtaattttagttatttgggaggttgaggtaggagaattgtttgaatttgggaggtggaggatttaatgagttaagattgtgttattgtgttttagtttgggtgataaggtaagattttgttttaaaaagataaatatataaaatgagttatttatttataaatttttgatttttttgggatattgtttttgtaaatttgtgatgttttttgtaaagtattagtgatttttttatttgtttttttatttaagttttattataaatttgatgtttaatatttgttttaattttagtagaatttttgttgttttgattggggttttgttttaattgatgttttatttttttttagtgttttaaattttgtttggtttagatatgttatgataagttagtattagtttattttggggtaaaaaaatttgaaagttatgtaagttttgttataatgtatgttttttatgagttttttgaagatattttatttttgatgttgtttgagttttagagggagttggttttgtttttttttgttagattgttatggtgttggggtgagggatagagtaggttagtagttttagggtgattttttttagagtgtggtagatggtttgttgtgttgtgtgtggtttgggtttgggttggttgtttagttttgagttttagtgttttttgtagtttggagatagtagtgtttgttaggtttttgtgtagatgtggtgaggtagtgtaggataagtagagagtttggttttggggttagtagttaggagagttttagttgttttagttttagagtttttttagaggaggggttttgaggaagattaggtgtagtgggattggattggagtgttagtgtaattggggtagttttgtttatttgtgttttattagggttgaggatatagtttgggtattgggagatattgggagtgggggagtttggagttatatggtattgaggattattgttttttgttgtttttttttagtgtgtttagtagtttagaaggtagttagggaggtggtgtttttggtttttgagttttagttatttttttttaagtttgtttggggttgtttgttttaggtgtttttgttgtgttgttaggttttagtatttgtggtgatgtaggtggagtttttgaggaggggttttgtggtgtttttggtttggtttttgatggtgtaggaggtgtgttatttgtgggtttagtaggtgtagagggtattggtgagtttgttgtaggtttttgttaggttggtagagaagttgttttttgtttatatttttgtttttggtgagaagaggaggattgtttatatttttaatttttgtttggttgtaggtgagttttggtttagggggtttgtgttggggggttgtgggtatgtgggtaggagaggtggtattttgaggtttttgagtttatttgaattatatggtgtttgtttatgggatgattttgggttttttttttggggtttttagtttgtttgtttgtgaaatggggattgttgaggggtgtaggaggtttggtttagtattttttttttttgatttagttttggggttattaggagtttaatagtttgttggggattgggttgaattagggtttgagtttgtggttttagggaatggggagttatgttggggtatttggtattgggtggggagtaggtttttgtaggtgtggtttttttttggtgtgtgagtggggggtgtggtttttgatggaaatgagtgttgtttttttaggagtggggttgtattttttttattttgaggggtattttttttttagtagggttttgtagaaagttgggttaggttttagtggtgggtggataggattttttatggggggttgttttgttttttgtgtttttatattagtggtgtttgtagagtgagaaagtatttttggaggtaggttatagatgagggttttttagaaagtttttaaaaaatgtaggttttggtttggaggttgggaaaggtttgtgtgtttggtaagttttttgggagggtatggttgttgtttgaggattattttgagtagtttgttggtttggagtttttgtttttttggtgttggttggagagttttagggttagttttggtgatttttttgtagattttatggattttatggttttttttagggagagttttttaggttattttgattttttttttttagagtttttttatggttgagattttagttttagggaggggaaattattgagttgggtttattttaggattttatatgttttttgtttgtgtttttgtgtttgggttgttttgttgttgatttgtggtgggtgttgagttgttgtagtgtttttggggtttgttgtttgaagggagtttggtgttttaagtgttggtagtgttgtagggtgggtttatttggtttggaggatttttgtggttgtttgggtttgtttttagtgtgtagttgagggagtttggaggttttttgtttgtttttgaagagtaaattttttattgtaagaggtgtgtgttagtttggtgggtagtttgtttttttgttgggtggtttgtggtagtatgagtagatttattttgttttttttgtattttttagggttagatggtattttgagggatgttgttttgagattagggttagatgtttttgtttatagtttttttttttgggttggtgttgagtttttagtttagaagtttttttgttatatagatgtatatgtttaggttgtagttgtttgtgtggttagttttttgaagtagtttttgtaggtttggttttttttttttggtttgtgattttattaaagggtaaggtagaatatagaggttgtagggtagggtaaagttaatgagtaggtgggggtatttgagattttttggttttttgtttgggagttagggttttttttttagatattgatgttttgggtttggggttagaatatgtggtagaggtttggattattttattggtgatgtgtttttagtggtttttgtagtttgatttgtgttttttgttttgatggatttgtttgaaggtagttagagtttgatgttattgtgtagttttagttttttattttggtttggttttttgtatgtggagatgtatgtgttgttggtgttgagtggttgtggttgtttggtgttttgttatgtggtgatgggtagttatttgttttgtgtttatattttttgtgttttgttagtttttataggtgttaagaggatttttgtggttagtggtagttagttttttaatggttttgagttaggtggttagtagttgaaaatatgtatattgttggggatggtgtttaagattattattattattatttttaagtgaattgtttatagtttatttttataggtagttttttttattttggttaggattattatttttaagattatgttttgaggtttggttatatgggatttgtggagggttagttttgtttttgttttgtgggtttttgtgttttatattgtagtatagtttttattttttttttttatgttttggtgttttttttttttttttgagatggagttttgttttgttgtttaggttggagtgtagtggtatgattttggtttattgtaagttttgttttttgggtttatgttattttttggttttagttttttgagtagttgggattataggtgtttgttattatgtttggttgtttttgtatttttagtagaaatggggttttattatgttagttaggatggttttgattttttgattttgtgatttatttgttttggttttttaaagtgttgggattataggtgtgagttattatgtttgattgttttggtggtgtttttttgttttgttttgttttgtttttttggttggttggtgttttttttttttgtttagagatagggtttttgttgtttaggttagagtgtaggggtgtaattatggtttattgtaattttgattttttgggtttaagtgatttttttattttagttttttgagtagttgggattataagttggtgttattatattttagttaataattttgttttttattttgtagagatagggttttgttatgttgtttaggttgattttgaatttttgtttttaagtgatttttttgttttagttttttaaagtgttgggattataggtgtgagttattatgtttggttttgttttgtttttaattaatagattttatgttttttgagtaattttaggtttttaggaaaattgagtagaaagtatagtaagtttttttgtgtttttatggttttagttttttatgattttagttttgttgtttttagttttttttgttgtttttgttttgttttggtgtgtttgtttttattgtagttaggttgatttgttttagtgtattttatttttgtttttagttatgggtatggttttattgtgtttgtgttttttgttggaggttttgtggaggtttttatttatggtagtttttgttttttttttagagtttaaagaaatttattatttttaaagagtttgggggtaaagtttttattgttatttgttagtgttattttaatttgtttattgaggagtgttttaagttttgtatttttaattaggaggttatagagaaggtgaggttttggagtttttatttggttggttgggtggggattaggggtttagggtggtttttagatattttttggttttttagttgtagttgtgatttggagttgtttgggagagatgtaagtttttgattttatggtgattttattgttggggttttttggtattaggtaggtatggttttagttgggtattgtttgttttttaggtattgaatgaggagaaggtggtttatgattgtagttttagtaagaatatttatttgaatgtggttgtgaatatttttaagaagtttaggggtttggtttttagtgttgtgtttggttttagtagtgagttttggtgggtgggtgggggaggtttagggttgtttttggggtggtagttgggttgggatttttgttgggatttttatagttttgagtttagttatagttttagataaaaggaaagtgtggtgttgtgggggggttgtttgttgtttggtttttaggtttttgtgtaggatggatttggttttggtgtttttgttgttagttgtttttttttgttgagtggggtttttaagttgagttgaggggttgtttgttaatggagttgtggtagtttttttaaagtaggaggtttagggttgggtgagttttatgtattaagttttggggaggaagaaagtggagatttgggtgttttattgtagtttttttaggttgtattaagttattattggtttttgtttttgtttttgtttgtattagtatttggaggggttttgggttggtgttgtaggttgggtggtttatgaaggtttaaagtttttgaaagttattagattttttgtgttgttttttttgtttttttttttttgtttgaggggaggggatgaagattttgggtgtggggtttttgtgtagttttggggtttgtagagttggtggttgttttgtgtttttggtttattgtatgtttgttttttttgtttgggttaggttggaatttggggttagtggggtgttgttttagaaagggggagttgaggtagaggtttgaggagggtagggtgggtgggagagtaggtggggtaggggtttgagttagttattttatatttttttttttttttttttttttttttagaaattagtggttgtagggttgtgttttatgaggtggtgttggggggtaggttggttgttaagattagttttttgtttagttgtttaagtagtttttgggtggaggatttgaaaggtaaggttttgtttttgttttgttatatggtgttttgtgggtttttgttggtttagtttttgttgtgttatatggtgttttgtgggtttttgttggtttagttgttttttttggtggtgtttattgttttgtgggttattttaggtaggggttgattattgtgtttgtttataggggttgttttgtatagttgttttagggagtatttgtttatttaggattagtttaaggagaatggttatttttttttgtatttagagtggtttgggggtgtaattatttttatagttgaggagaagaggtttaaggattgtgagttgttggtttgtgatggtttaggtgggtaggtgtgggatgtgggtaaggttgggtatgtgggttttagtgtgagttttagtttttatttgggtttttatttatagttttttgtaggatttgttgttgttgtggtattgagtattttgtgttttttttaggttgttgtatttgggatgaggagtgttattattattggggatggttgtgttggaattggggtaaggttttatttgggttttttttttttttatttatggtttttggaatttgggtttttttttgaggtttttagaattggggtaaggttttatttaggttttttattttatttagggtttttgggttgtattgtttttggtagagttggggttagtttttggttttattttttttttatttgttttttatgtaaaagtaagataagagtttttttatgataaggtttaaatgttattatttgaaaggttttgtgtttttgtttttttgtgtttttggtttatggaaatgtggaggttgttggttttaggagtggaggggtttgttttatttttggtttggtggttttatttaattttttaggtaattatgtagttatgtttagggtatatggttagttttgtatagttttgtggtggtttttaaagttattgttttagggatatttggagggtgttgtttggggtagtgttgttaagaggtttttgtagagggtattggtttttttggatttaggtttgggtgttttggttgttatatgattgttggggtttggtttgtttttagttttattaagaggttgaggttttttgtttttagtttttattttttagtagggtttggtagatgtaggtggttagtgttttgggggttgtggagtgggtttggttgggttttgattgtgtgtttgtgttttttgtagtggttggaggttgggagatttagtatatgtgttgtttggttgttgttggttttgttggttgttaagttgtaaaggtgagttttggtgttttagttttttttgtttgtttttaatagatttttgtttttttattgttggtgtggggttttgggatatagtatagttttgggtttagggtttgggtttttgggtagttttttttgtgttatttagagaatgtagtatttgtaggttttaggttttgtttttggttattttttattttgggaagttgttttttttgtgtttttttggtaagtttttttttttatttgtttattagggttttaattagtgaatgggtgtgatggatggataggatggttttgaagggtttagagatgtgttgttgttgttatttttgtttttattgtattttgaagttgtttttatttgttttttttatttttagtaatatgtgtaggatggttggaaggagtgttttgagggttttgtgaagatttttgagaaagagtttttaggagatatttatttggggatttatgttttggattgtgagatggtgaggttgttttttgtttagtgttgggtttaggattggggaggatttggtttggtgtggttgttttatttggttttatttgggtttggtttattggttagtgtttagggttttttttgtagtattggtg

SEQ ID NO: 299 - DNA, 9724 bp, Artificial Sequence
  chemically treated genomic DNA (Homo sapiens)
ttttttggtgtttaaggtagggttagttttatttttaggagatggggggtttttttattattggggtttttgtgtttttaggtgtatggaggagggtagttttatggtgttggagtttttttaatatggtttgtttaggtagtattttggtatggttttttggggttggggttttgggttaggtttgggttttatggtatttgaggaaggtgttttttaggaaggtggttagttttatttggttgttttgtggaaggagggaggtatgggggatggaggggtgtggtttgttttgtgtgttttttttgttaggttgtgttgtattgtttagtgtattttgtggaggaagttatagtgtatgagttttgaggtgaggttttgggtgttgtttgttgaggtaatggtgtaaggtgaggtatgaggttgttgtttatttgttgtttggggttattgtttgttgtttaagttttttgtttagtttatttgggagtaggttgtaggttagttgttggtgtagttggttttttagtattagaagtagagtgagttggggaggtggtggggtgtggttggttgggggtttagggttttgttatgtttttgttttttttatggtagtgttgtttttttaggttttgtttatatgttagtgtgttttgtttttgtttttttttaggttgtattgtatttggatgatttgtagtgggggaaggttgggatttataaatttagtagtaagattatatgttgtggttttaaaggggttgggaagggatagtaaagattggaaaggggggaatttttaagaggagtttattttattgttagtggtttggtaagttaaggaaagttttgagaagagttgatattaggggttgggtattgaaggttgaataggagtttttattgtggagagaataatttgaataaagagggaattgtgggtgtggggaaagggaggttgggtgggataggattgtgttgaagtgtatggtgtttgtgggattaggttttttagagtttgggtgttagttgaggatttttatgatttttgttggtagttaggagtaggtagtttgtttgttaggatatgaattttggttgtattgtattgagagaggtttttggttaggagggggtgttgtaggaaaagtttggggagatattaggatatagatgtttgggaattagtattaggtgggggatgggaggggtggggggggggtgggaggggtgtgggggtgggggaagattgttggtagggtggaagagtttgggtgagttttggaggaaggatgtttggagtaggtttagggtaggtagtaggatgtaggggaaggatttgaggggatagggagttttttggaaaaggagagtgtttagtttgttttataatttttatgatttttataagggggttagtttggatttggtttttggtagttaggaggagagttgggttgtggggatgtaggttttaagagaaggaggggtattttttatttggttgttagaaggtttgagggatggtattgagtagtaggagaggggatttatttttttggttttagagttaaagggttttggtgttggggttttggttttttggattttttttgggggtggggttagtatatggggtagttttaggggttgagtggttgtaaagtttattagtgggtagattttatttttggggatataatagggtggttgggggtttaggtttgatagttgtttggtttttaattttatattagtttttatttgatattttttaggaatttgtttagttttatgaaggagatttttgagtatttggtatggaagtgggaggtatatgaggggttggttggggtgaggggaggggaggtgtggggaggggatgtgtggggaggggaggtttttgggtgttgattgtttattgttattgtagtgggggtttgtggggttggggaagttttgttaagattgtgtgtaggtttatggttttggtttttttttttattatatttttaggtatgaggtttgtggttataagagtattaaggtggtgtgtttaggttgtgggttttgtagggttttttttatgttttaatttttatttttttagttattttttgggttggtttgttgtttatattggtgttggatgaagtagtgggttgttaggagttttagtgagtgtattttgaagagtatgtggtggaagaggaggttgtgggtagagggttggtgggtagggttttgggttaggtagtaaaggatgaatttttggggtatagggaggagaggttggtggtgtgtaagggttttttgttttggttttgtagtttgaggagaggtggtttttgagttttttatgtttttttttagggatatataggatatgtagggatgtttatagggaggagttttagtagtagtagttaggttaggatttggttttttgagtttgaggatagttgggttttgggattggagtattatgttttgttttttttgatttttaaaaaattgtggggagaagttatgattttaaagttatatttgtaagttttttatttatggttttttgattggtttagtttgggtttaatattggagatgattttgatgggtttttattttgtttatatttgtgtttagtttggttttagtttgttattagttttgattaggtatttttattttttgaggttatggagttaagtttagattttgagtagagggggttgtggatgtagtttttattttatatttttttttgtttgtttggtatttattatgtttttttataagttggagttttattattttttggaagtttaaagttaaggatttggagtgaagtagatttaggtgtagatgttggttttattatttattttaaagttttgggtaaaggatttattttttttgaattttggtttttttataaaatgggtatggtgatggtagttatagagggagggttttttttgtttttttgtttttagaatgtgttgattttttagggtttttaggtttggaattagtatgtgtttttattgaggttttttttgggaggggtgtagttagttggtatattttttaattgtataaattgtgatgtttttttaggtttgtttggagtattttgttagttttagttgagtatggtgagttagttggggaggggtagggtaagttgtttatttgtatgttggggttatttagtgagtgtttggtgtgagtaatggttttttttgtgatttgggtgtttttattggtttggatttttagtatagttatttggggtatagagttaggttaggtatggggaagggattatataggtgagttaggtagggtatagttaggaggagggtagagtataaggtggagggtgggggtagtatttttagtgtatatattttaaaggagaagatgtttatagtggttttattggttatttttgaatagaagagagtataggatatgtaggagagaagtgtagggtaggtatggggtatttggatttagtattatttatttttatattttggggggaagaagtgtaggttttgaagttttttttgtttagtgtggatggggttttggagattatttggaagtgttgtgggagggtgtagagttgagtgggtggggatttttttaggattttgtttttttaaagtttgtatttattattggagaagatttggtgttatattgttaaggggtgggagaaagagtggagttagttgttggggtattagaatttttttgtttttggttttaggtatttttttttgttttgtttttttatttagttttgttttgttagtattggagttgattttgatgaggttgttgtgttgaatgaagatggtgttgttggttaggtttttgtggatgattggggggttgtaggtgtgtaggaagttgtagatgttggggaggggagagtaggaggagttggttaggaggttttggagagatgggggtttggtggtgttgtgtttaggttagtttaggtttttatttgagtgtagataggatttgtgtgtattagtgtttttaggtttggtggtggatgtatgattttgttggttgggtgggtgtaggagaggtggttgggtttgtggagtttgttttgtatttttgtttagtttttgtttgaggttgttgggtatttttttattattttagtttttgaggttgttttaattttgttttgtttttgtggttgttttagtttgttttttatatttgggtgtttatggttttgtggttttttttggtttttttgaggaattgtttgaggttgtttgatgatatgtattttgtgatgaagatgatttgtatggtgtgagtttaggatttttattagttgtgggtttgtttttatgtttgttttatttagttgtggtttttgtttgtttggggttttgtttgtgtttatttttgtgtaggttttagaggtatttagttagtatttgtgtaattttatgatgtttgggtggtttattagtattagttgtttgaatatggtttggatttttttttggggagggagggtggttgttgggtggttagtaggtggttatttaagtaggatgaggagggggtagtggttttattttgtgtgttgtgaaggtttttttgtttttgaagtggagtttgttttatattatttttatttttttttttgtgtttatggttaggaaggtgttttgaagttttggtatgtttttttggtttatttgggggtgaataaagggttatgtgtgttttggtgtgtgttagggttgtgggtgaggatttggtttttgtttatatttttttagtgggtttaagtgtgggttgtaggttttgagttattttgtgggaaggtggggtttggagggtagttgtttttaggagttaagggtttttatttaagggttgggttaaggggatttggagtaggttttagggggttgagggggatttttaggaagttagtggttgagtttagaggtatggggaggtggttttgggaggagattggtttttagggagttttagggtgagtgttaggttaaaggggtttaggggtggttgatttgtgggttgtgaggggttgtggagaggtttttagttgttgtgtttttttagtgtttttatgttttgtgtagtttttaggttttttttgttttgggagggtggtgttattttgtgttttaatttttgtgtttatttgtttttgttgtttttgttagtgattatatgggtttttttttaggatgttgtttttgtttttgtttttgtttttttgtttttgtttttgtttttgggtttgttttggtgttggttttggggttgttatggtttggttagtttaggttattgttttttgtgtgatttgttgttggtgtagttttttttggtttgttttggttttgtgtttagtagtttagtttagagttgttgtggtagtttagagttttagttttggttttgggaattgggaggtgtgggtgtgtggtggatgggtggggtttgggggtggagttggtgtgtattttttgagttgtttgtgtttgttggagttagagtagagtttttttgagagttgttgagtttgggttgtgtttaggttttgtttttttggaggttttgttttgtgaagttttgttttagtttttgttttttttttgttttttaggtttgttttgtgaagtttttttttaggttttgttttttttttgttttttaagttttttttgtgaagttttgttttaggatttgttttatttttgtgaatttttgttttgttttagtttttgtttttgtttgtttttagggttttttgtgaagttttattttaggttttgttttatttttttgaagttttgtttttatgaggttttgttttgtgtagaggaattgtttttaaatttttgtttttttggaggttttgttttgtggatatttggagtttggagtgtttattttttttgtggttgtttttttaggatttgggggaagatttggggtatttgggggtttttaagtttatggtattttttagttgtagaagattttgtgggtttgaaagtgggatttgtttttttggttatgtatttattttttggttgatttttaagggataggttgaaggggtattgagggtgggggaaaggtttattagtaggttgatttaggttgattttgattggtgattatgaatttttttttggtttgtttattagtgtttttttttgtttataagtttatttttttattttttaggatggtgatttttttttttttttttaaatgtgtattttttttttgtggttggtttttatgggatagtggaattatgaggggggagtttatttggtttatatgatttttttttttggaggttgttttaagtatattttttagttatgttgattattggggttgtttttgatttttatttaaaattttttttagtttatagtttttatggtttttttgtggtttttttttttttttatggtgggtttttattttttattttttttttttggagtttaaattggaattttgttttttttttttgtgtagttttatgtattggttttttgggatgtttttttttttttttggtagaggtgtatttggttttgttgtgttttttgtggttttttttttttgattagttttggttattaggtattttgtgtgtggtttttattaatgttaggtgattttgttgaggttttttgtagtaaaggtttggggtgtttaaattttttattttgaaattggttttgattagtttttgggagatattttttaagtttttggaatgttttgtttgatttgaatgtttgtgtttattttggttatattagattttatgttaagtttgtttaatttgtagtttagagggtgtatttggttaaggatagttttgaatatggtttaatataaatttataaatttttttattgagattttttttaaagtttattagttgttgttagtgttaagtgtattttatttaagggtattgtttaggataatttttttaatgtgtgttaggaaagtttatagattggatatttttggtttgtgttaataatatggtttatggggggattttgggttatgtggtattagtttgatttttgtaggggttggaggttaaagttagttatttgggaggttagttatgtttgtgtgattaatttaataaaaattttggatattgaggtatggagggtttttttggttgttgatatgttgtgtttattgttatattttagtgttgggaggttgagtattgtttttatgtttgtagtgggtggggatatttgtagatttgtgttggtttgttttgggttttgttttgtgagtttttgttattgttgattttaatgtatttattgttgtaataaatagtattttttttgagttttgtgagtttttttagtgaattattgaatttgagggtggttttggggagtttttttagtggtttttttttatttggtatgagggtttaaatatgaaggtttagtaattggttttattattttattttatgttagttgttttttttagttgagtttattttaagtatatggttttgtgttattggatatgataggtatttttttttagggtttttgttttggttatatttttgtttggaatgttttttttaaatattttttgaggttattttttgagaggtttgttttgattatgaattttgatattatagtttttatatttttttgtttgtttgatttgattttttttggagtatttattttatttgatttgtatttgggttttttttattttttttttttattgtttgtgtttttgttgtgatttgagtttttgtagggtaggagtgtttgtttgttgtttttgttttttttttggtgtgaggatggtatttggtatatagtaggtttttagtaaatatttgttgaatggatttgtgggtgggtaggggtgtgttttggtgggtgtggtttagagaagtttttaaggaggtaagttttgagtagaagaattttaatgaatttttttttttttttttgtttttataattagatatatatgttttgtggtaggttatatagtgttttttaaaagtttatattttgatttttagtatttaggagtatagttttatttgaaaaaaaaaaaatggtttttgtagatgtaaataagtttaggattttgagatgttggggtgggttttaaatttaatgtttgatgtttttattagagaaagaaaagggatatttggggtgtagagaaataaggtagatagttatatgaatatggaggttagtgttggagggatgtatttataggttaaggtgtgtttgggatttgaggatatgagttgttttagtataataaaatatataaaataagaatagttgtattgatatagattttagatatgattatatatgaatattattaattattagtttgtagtaattattttttattttaatattataataatttttattttataattatagtttaggaaaaattaggttatatagagataggagttaaggggatatagtgaggagtaattagaagataagagtgtgagttttttgttatgtttagatagggttattagagggttttttggtttagtggtaatgttagtgtttgggaagatgtttgttgttaagtggattttggtttagtggtaggtgtagtgttaaggaaaaatatttgttatttagtagattgggaaagggagttttttttgttttggtggagtttaaagaagattttatttttttattttttgtggagggtttgatattagttaggtttgtttgtagttatttggaggtttaattgtttttttgtgatgttgtgttttagtggttatatttttagtttgtttttatgttttattttgtatatttggttttgttttttagatagtagtagtaaattagtgaaagtattaaaagtttttgatatgtagaaataatggtgtaggttgtttttttttttgttttttttttttttttgttttggttgttaggtagggaagggttttttgtttagtggatatatgatttatgtggttttatttattattggagatggtttattttttttattttgtttttttgttttgtatttaataaatattagtgtagtttggtatttggggttattattggtttttgtgatttggtggtagtggttttttgggtttagttgtttttttttttatttttgttttgtgtttttatttttatatttttttgtttttgtatatggggagagatttattgtttttgtggggttggattttatttgggattgttagggttatgagtggtgaggagagagttttgggatggatttttttttggagtttttggaagtattagttttattgatattttgattttgtatttttagtttttagtatagtgagtgaatttgtttgtgttgttttatgttatttttttatttttggtgttgttttagtatgatttttgtggtaagaatagtaatgtgataatagttatgtgtttgtgtgtagggatgtgttttagtatttatttttatgtatagagtgggttgttttattgtttgtttatgtatagaagtggtggttgttgtggtatattttttttggttttatttaggttgtgttttagggtgggggtgtatttttttttttgtttggttt

SEQ ID NO: 300 - DNA, 9724 bp, Artificial Sequence
  chemically treated genomic DNA (Homo sapiens)
aggttgagtagaagggagggtatgtttttgttttggggtatagtttgagtgaggttagggagggtgtgttgtagtggttattatttttgtgtgtgggtaggtagtaggatgatttattttgtgtatgggaataaatgttgggatgtatttttgtatgtgaatatatagttgttgttatgttattgtttttattatgggggttatgttggagtagtattagagatggaggagtagtgtaaaatagtataaatagatttgtttattgtgttggaggttggaagtgtaaaattaaggtattggtagggttgatgtttttggaggttttgagggagaatttattttaggattttttttttattatttatggttttggtagttttaagtagggtttagttttatagggatggtgggtttttttttgtgtgtagagatgagagagtgtagaaataaagatataagatagagataaaagaaaaggtagttgggtttgggggattattattattaagttgtggagattggtagtggttttgaatgttaggttgtattgatatttattggatataagataaaggggtaggataaggagagtgagttatttttaatgataggtaaggttatgtgggttatgtgtttattggatagggggtttttttttgtttggtagttgaggtagagagagagaggagatagagagaaagatagtttatgttattatttttgtatattagagatttttagtatttttattaatttgttattgttatttagaaggtagagttaggtgtataggatggaatatgaaggtggattaggagtgtgattgttgaagtatagtattatagggagatggttaggtttttggataattgtaggtgagtttgattaatgttaggttttttataagaggtggaggagtagagttttttttaaattttattggggtaagggagatttttttttttggtttgttaagtagtaggtgtttttttttgatattgtgtttattgttagattaaggtttatttggtaataggtatttttttagatgttggtgttattgttagattaaggagttttttggtggttttgtttgggtataatagaaggtttgtatttttgttttttggttattttttattatgtttttttagtttttatttttgtatggtttggttttttttaggttatgattatagagtgaggattattataatattggaataaagagtaattgttataaattaatgattaatgatatttatatataattatatttaagatttatattagtataattatttttattttatatattttattatattggaatagtttgtgtttttgagttttaggtatgttttgatttgtgggtatatttttttaatattggtttttatgtttatgtgattgtttattttatttttttgtattttaagtattttttttttttttttgataaggatattaaatattggatttagggtttattttagtattttaagattttaaatttatttatatttgtaaagattatttttttttttttaaataaggttgtgtttttaggtattggggattaggatgtagatttttgggggatattatgtgatttattatagaatatgtgtgtttggttatgggggtggagaaaggggaggaaatttattgagatttttttgtttaaggtttatttttttaggggtttttttggattatatttgttaaaatgtatttttgtttatttatagatttatttaataagtgtttgttgagggtttgttgtgtgttgggtattgtttttgtattagagaaagagtagggataatgagtagatatttttgttttgtgggagtttgaattgtaatagggatatagatagtgaagaagagagatgagaaaaatttagatgtaagttaggtggggtgaatattttgggaaaagttaagttaagtaggtgaaagggtgtggggattgtgatgttaggatttgtggttaggataggttttttaggaagtgattttagaggatgtttgggaagggtgttttgggtaaaggtataattagggtagagattttgaggggaagtgtttgttatgtttgatggtatagggttgtgtatttggggtgggtttagttgaagaaggtagttgatgtgaggtagggtaatgggattaattattgggtttttatgtttaggtttttatattaagtgagaagggattattgggggggttttttaaaattatttttaagtttaatggtttattagaaggatttatagaatttggaaagggtattatttattatagtaatggatgtgttaaaattagtagtggtaaggatttatagaatagaatttaggatagattagtatgggtttgtaggtgtttttatttattgtaggtatggggatagtgtttaattttttagtattgaggtgtgataatgagtatagtatgttagtagttagggaagttttttgtattttagtgtttagggtttttattgggttggttatataggtatggttgattttttaggtggttgattttggtttttagtttttgtagaggttaggttgatgttatatggtttaaggtttttttgtagattatattgttagtatagattaggggtgtttaatttgtgggtttttttggtatatattggaagaattgttttgggtaatatttttaaataaaatatatttaatattaataatagttgatgagttttaaaaaaaattttaataagaaagtttatgaatttgtgttgggttatatttaaagttgtttttggttgaatgtattttttgggttgtgggttggataagtttagtatagaatttggtgtggttgaggtaaatatagatatttaaattaggtagaatattttaagggtttagagggtgttttttaggagttggttagggttagttttagggtggaggatttgaatattttaaatttttattgtagagggttttagtaggattatttggtattggtggaaattatatataaggtgtttggtgattaaggttggttagaaaagagagattataggggatgtagtagggttagatgtatttttgttaaagaaagaaagaggtgttttaaagggttagtgtatggagttgtgtggaggggaggagtggagttttaatttgggttttagagagagaaggtaaaggatgaggatttgttgtgaaggagggaggagattataggaaggttgtgggggttgtgggttgaagggggttttaggtgagaattggggatagttttggtggttggtgtggttggagggtgtgtttagagtggtttttggagggagaggttgtgtgagttgggtgggttttttttttatggttttattgttttatgggagttagttgtggaaaggaaatgtgtgtttgaggagaaaagagaaaattgttattttggaaagtgagaagatgggtttgtgggtgggaggaggtattggtgggtgggttagggagagatttgtggttattgattaaagttagtttgggttagtttgttggtgggttttttttttgtttttggtgtttttttgatttgttttttgggggttggttggggaatgagtgtgtggttaggagagtgggttttgtttttgagtttgtggggttttttgtagttggagggtgttgtgggtttgggggtttttagatgttttgggtttttttttagattttaggggagtaattgtgagagaagtgggtgttttgggttttaggtgtttgtagggtggggtttttgagggggtggggatttgggggtggtttttttgtgtggggtggggttttataggggtggggttttgaggaggtgaggtggggtttggggtggggttttgtggaggattttgggaatgggtgggggtggggattaaaatggggtggggatttgtgggggtggggtgggttttggggtggggttttgtgaaggaggtttggaggatgaggaggggatagggtttggggaggggttttgtggagtaggtttgggagatgaggaggaaatagggattggggtggggttttgtggggtggggtttttgggggggtggggtttgggtgtggtttgggtttggtagtttttggggaagttttgttttggttttggtaggtataggtggtttgggaggtgtgtgttggttttgtttttgggttttgtttgtttgttgtgtgtttgtgttttttaatttttagagttggggttggggttttaggttgttgtggtggttttaggttgggttgttgggtgtgaggttagggtgggttgggagaggttgtgttggtggtggattgtgtagagggtggtggtttgggttggttgaattatggtggttttggagttggtgttgaggtgggtttgggaatgggagtgggagtgggaggatgagagtgaggatgagagtgatattttggaggaaagtttgtgtggttgttggtaaaagtgatgggagtaggtgggtgtgggggttggggtatggggtgatattgtttttttagagtgggaggggtttggaggttgtgtggggtgtgggggtgttgggagagtgtggtggttggaaatttttttgtggttttttgtggtttgtgaattagttatttttggatttttttggtttggtgtttgttttgggattttttgagggttagtttttttttaggattatttttttatgtttttggatttagttgttagttttttggggattttttttgattttttgaaatttgttttaaatttttttagtttagtttttggataggagtttttggtttttgggggtagttattttttaagttttatttttttgtagagtggtttagggtttgtagtttatgtttgggtttattggaaaggtgtggatagggattaaatttttatttataattttgatatatattagggtatatataattttttatttatttttaggtaaattaagggaatatgttagggttttagagtatttttttagttatggatatggaggagggggtagaggtggtgtggaatgagttttattttggagataggaaggtttttgtggtgtatgaggtgagattgttgttttttttttattttgtttgggtgattatttgttgattatttagtgattattttttttttttaggagaagatttagattgtgtttgagtagttggtgttggtggattatttgaatattgtgaagttgtataagtattggttggatatttttgaggtttgtgtgagggtgagtatgggtaaggttttgggtaggtagagattatagttaggtggggtgggtatggggatgaatttgtagttggtggaaattttgagtttgtattgtgtaggttatttttattatagagtatgtgttattaggtagttttaagtaattttttaaaaagattaagaagaattataaggttatgaatgtttgggtatggggagtgggttggggtagttatggggataggatggggttggggtagttttggggattgggatggtgagggggtgtttggtggttttggataggggttgggtgaggatgtggggtgggttttgtaggtttagttgttttttttgtgtttatttgattgatggagttgtgtgtttgttgttaggtttggaagtgttggtgtatgtagattttgtttgtgtttaggtgagggtttgggttggtttgggtgtggtgttattgagtttttatttttttagagttttttgattggttttttttatttttttttttttaatgtttgtagttttttgtatgtttgtagttttttaattatttatgggaatttgattagtgatattatttttatttagtataatggttttattaagattggttttggtgttggtggggtagggttgggtgggggaatggggtaggggaaggtgtttggagttaagggtagaggagttttgatgttttagtagttaattttatttttttttttgttttttggtagtgtggtattgaattttttttaatggtaagtgtggattttggggggatggggttttggagaggtttttgtttgtttagttttgtgtttttttatagtatttttagatgatttttgaagttttatttgtgttgagtgagaggaattttggaatttgtattttttttttttagagtatggaggtgagtggtgttgggtttgggtgttttgtgtttattttgtgttttttttttatgtgttttgtgtttttttttgtttagaggtggttgatgggattgttgtggatatttttttttttgggatgtgtgtgttggaggtattgtttttgttttttattttgtgttttgttttttttttaattgtgttttgtttggtttatttgtgtggttttttttttatgtttgatttggttttgtgttttagatggttgtattggaaatttagattaatggggatatttgggttatagaggaggttattgtttgtgttaggtatttgttgagtgattttaatatgtgggtaagtagtttgttttgtttttttttagttggtttattgtgtttagttagggttagtaaggtgttttaggtagatttgggagaatattatagtttgtgtagttgaggggtatattagttgattgtattttttttaaagaggattttagtgggagtatatattggttttaggtttgaaggttttaaggggttagtatattttaaggataagaaggtaagagagattttttttttgtggttgttattattatgtttgttttataaagaaattaaggtttagaggagatgagttttttgtttaaggttttagagtgagtggtggagttaatatttgtatttgggtttgttttattttaagtttttgattttaagtttttaggaggtgatgaggttttagtttgtggggggatatggtgggtgttaagtaggtaaaaagaggtatgggatggaagttgtatttatagttttttttgtttggagtttagatttaattttatggttttaggagatgggggtgtttggttggggttggtggtgagttggagttgggttgggtatggatgtggatagagtggggatttattaaggttgtttttagtgttgggtttgagttgagttgattaaaaggttatgggtaggaggtttgtaggtgtgattttaggattatggtttttttttatgattttttgggggttgagggaagtagagtatggtgttttaattttagaatttagttgtttttaagtttagaggattaggttttggtttggttgttgttgttgggatttttttttatgggtatttttgtatgttttgtgtgtttttgaggagggatatggggaatttaggggttatttttttttgaattgtggggttagagtagagagtttttgtatattattagttttttttttttgtgttttaggagtttattttttgttgtttggtttgggattttgtttgttggttttttgtttatagtttttttttttattgtgtgttttttgaggtgtatttgttgaagtttttggtagtttattgttttatttagtattagtgtgagtagtaggttggtttggggggtggttggggaggtggaggttgggatgtggaaggggttttgtaggatttatggtttgagtatattgttttgatgtttttgtggttgtagattttatgtttgagaatgtggtggaggagaagattaaggttatggatttgtatgtggttttggtggagtttttttggttttgtaggtttttgttgtagtggtggtgagtagttagtatttagaagttttttttttttatatattttttttttgtattttttttttttttgttttggttagttttttatgtgttttttatttttatgttaggtatttggaagttttttttatggagttggataaatttttggaggatgttaggtgagaattgatgtaaggttgggggttaggtagttgttaggtttgaatttttagttattttgttgtgtttttaggaatggaatttatttattgatgaattttgtagttatttgatttttggggttgttttgtgtgttggttttatttttggaggaggtttaaaaggttaagattttgatgttagagttttttgattttgagattagaaaggtgagtttttttttttgttgtttagtgttattttttagattttttaatagttagataagaggtgttttttttttttttagggtttgtatttttatagtttagttttttttttggttgttagagattagatttaggttgatttttttgtgggggttatgggggttataggataggttgggtattttttttttttgggaggttttttgtttttttagattttttttttgtattttgttgtttgttttgaatttattttaagtattttttttttagaatttatttgggtttttttattttgttagtaatttttttttatttttgtattttttttattttttttttattttttttattttttatttggtgttgatttttggatatttatgttttggtgtttttttagattttttttgtagtatttttttttggttaggggttttttttggtgtagtgtagttagaatttatgttttaataggtaaattgtttgtttttggttgttagtagagattatgggagtttttagttgatgtttaggttttgggaggtttgattttgtaggtattgtgtattttggtgtggttttgttttgtttaatttttttttttttatgtttatagttttttttttgtttaagttgttttttttgtggtgaaagtttttatttagtttttagtatttagtttttaatgttgattttttttgaagttttttttagtttgttaagttattagtagtgagatgggttttttttagagatttttttttttttagtttttgttgtttttttttggtttttttggggttgtggtatgtggttttgttgttgggtttgtgagttttagtttttttttgttgtaggttatttagatgtagtgtaatttggagagaagtgaggataaggtgtgttggtatgtgagtggggtttgggagggtggtgttgttgtggggaaggtgggagtgtggtggagttttgaatttttagttgattatgttttgttgtttttttagtttattttgtttttggtgttggaagattggttgtattggtagttgatttatgatttgtttttaagtaggttgggtaggggatttgggtggtgggtggtgattttaggtggtgggtgggtagtggttttatgttttgttttatgttattgttttagtggatagtgtttaggattttgttttggagtttgtgtattatggttttttttatgaggtgtgttgggtggtgtggtgtggtttggtggagggggtgtatggggtaggttgtgtttttttgttttttatgtttttttttttttgtaggatgattggatgaagttggttgtttttttggagagtattttttttaagtattgtgggatttaggtttgatttggagttttagttttaggggattatgttggggtgttgtttgggtaggttatgttggggagattttagtattgtggggttgtttttttttatgtgtttgggagtataaaggttttggtagtgaaggaattttttgttttttgagagtggggttgattttgttttgggtgttgagggg

SEQ ID NO: 301 - DNA, 1301 bp, Artificial Sequence
  chemically treated genomic DNA (Homo sapiens)
aagtagttggtgttgtttttgaatatatttgggtagggtgagtaggatgtttttgtttagggagatttttttttttggttttggggaaggtgttttttatttttgtaggaggttgggtttgtaggatgtagtattgggtgggtgagagaaagtttgggtagaagagtatggagttggtgattggatgtgagtaaggggtgaatggagagtgttttttttgtgttaatgttgttgttttgggtgttgaaaagttgggaattttttggaaagtagtggtatttttttttttggaaggtgggtgtgggggttttaggttttgtatttgttaaatttgttttgttatttgggaggggtttgttagatgtgtttttttttagttttattttggggagaatgatgggggtgggggtgtgggggtgagtatagttgggtatttttgtatatttgtaggtgggattttggggtgtttttgttttttttttttgggtagttgtatgttgggatttttattttatttgtgtgtgaatttttgttatttgggatttaagtgtttgtggtttgagtgttgtggtaaatagaaggtatttgtgtgggtttttaagggtgtttgtgtgttgggtttgggggagtatgattggggtatttgtagtggggaggaagaggtgttgttggttggggtgagttgtttgtgttaaggttgttttttgtagggtgagtttgtgtatgatgatgtgtgggtgattgtgaataattttaatgtgtggtttggtgggtgttttgttttgttgaggtatttttattaatgattttttgggttagggtatggttgagaatattagttataagttttagtggttgtttagtgtttttatttttaagtgtatttttgtttagggtttttttttgagttagggttgggtgtagttgtgggattggtttgaagggaatttttattttttattatgttttggtttttttgtttttttgttttttttattttagttgtttatgttattaggtttttaggttttttttaggttaatttgggtttttgggattaggtgggaggtgtgtgttggggagttttttttgagtttttagagttttttgaggtgtttgtgttttaggttgtttgttttttttggatagatttgggaatgggtggttggagtggttattttattttttttttgttagtttttttgggtgagtaagaaaattagttttatatagttggttttggaggtgtggtgtgtgtggaaggggtgggggaaatgttgtttttagggttgtaatttttt

SEQ ID NO: 302 - DNA, 1301 bp, Artificial Sequence
  chemically treated genomic DNA (Homo sapiens)
gagaaattatggttttgaaaatagtattttttttgttttttttatatatattatatttttggggttaattgtgtaggattggtttttttgtttatttagaggggttggtggaagggaagtgaggtggttgttttagttgtttatttttaggtttgtttagagaaaataaatagtttagaatgtagatattttgggaaattttggaaatttgaagggaattttttagtgtgtgttttttgtttggttttaggaatttagattagtttggagaggatttgggagtttggtggtgtgaatagttggagtgggagaggtagggaggtagagaggttaaggtgtgatgagaaatagaaattttttttaagttagttttgtaattatatttggttttggtttaaagggaagttttagataggagtgtatttgaaggtggggatgttgagtggttgttaggatttgtggttggtgtttttggttatgttttggtttaagaagttgttggtgaagatgttttagtggagtggggtgtttgttgggttgtatgttggggttgtttatggttgtttatatgttgttgtgtatgaatttgttttgtagggagtggttttagtataggtagtttgttttggttagtagtatttttttttttttattgtgaatgttttgattatgtttttttagatttaatatataaatatttttgggaatttatgtgggtgttttttgtttattgtagtgtttaagttgtgggtgtttgagttttagatggtgaaagtttgtgtgtaggtggagtggggattttggtgtgtggttgtttaggagaggagggtaagggtattttggggttttgtttgtgggtgtgtgggggtgtttggttgtgtttatttttatgtttttgtttttattgttttttttaaaatggggttgaggaggggtatatttggtggattttttttaggtgatgaggtaggtttagtaggtgtgaagtttggaatttttatatttattttttagggagaaaagtgttgttgttttttgggaagtttttggttttttagtatttggaataatagtattggtgtaggggagatgttttttatttgttttttgtttgtgtttagttgttggttttgtgtttttttgtttaggtttttttttatttgtttagtgttgtgttttgtagatttagttttttgtggggatagggagtattttttttaaagttaggagaaggggtttttttggataaggatattttgtttgttttgtttgggtgtgtttagaggtgatattggttattt

SEQ ID NO: 303 - DNA, 22355 bp, Artificial Sequence
  chemically treated genomic DNA (Homo sapiens)
aggtgaatatatagtattttttgggttttatattagttttgggtgttagggatatagtagtgaatagaatagatggagttttttttttttgtagtggggggttgtaataggggggtttattggataaggagtatatttttattagagagaatattttagttgggtgagtggttttgtagggggttagtttgggggaatttttggagatggtgggaattgaataaagtttttggggaggttaggtatggtggtttatatttgtgattttaatatttggggaggttgaggttatagggagttatgattatattattgtattttagtttgggtgatagtgagattttgttttaaaaatttaaaaattgggttaggtgtagtggtttatgtttgtaattttagtattttgggaggttaaggagggtggattatttgaggttaggagtttgagattagtttggttaatatggtgaaattttgtttgtattaaaaatattagagattaggttaggtatagtgatttatatttgtaattttagtattttgggagattgaggtgggtggtttatttgaggttgggagtttgagattattttgattaatatagagaaattttgtttttattaaaaatataaaattagttgggtatggtggtatatatttgtaattttagttatttgggaggttgtaattttagttatttgggaggttgaggtaggagaattgtttgaatttgggaggtggagattgtagtgagttgagattgtattattgtattttagtttgggtaataagagtaaaattttattttaaaaaaaaaaaaaatataaaagattaggtggaggttgtagtgagttgagattgtgttattgtattttagtttgggtaatagagtaagattttgttttaaaaaaaaaaaaaatttaaaaagtgttttgaaggagttggggggggagagaagatagggttgttagggttttgagtgtagtgttagtttgtgtggggtatgtaggttgtgttttatgtttgtgttgggagagagagtagatggggtgtttggttttgtgagtggttgtgagtatgtgtgtttgagggtaagggggattttgttttggttgtatgggtgttaggtttatggtatgttttgggtgtgtgttgtgtgtgtgtgtatttgtatggtatgtgtgtgtatgttgatatggtagttggtgtatttgtggtttttgttggtagatatgtgttttttagttttttgtttttttttatttgtttttttttttatttttatttttttgtttttattttatttttttgagttgttatgtggttattattatttttgtggtttttgtttttagggtttttgtgtattttttttttttagtgtttatttgaatttttttttttatttttttatgttttagtttgtggtttggtagttttttttttaggttttggggttatttttggaaggtttggtgggttttgttagggaaggggtttataggattttttgagggttgtggttgttaattgttgagtgtagggtgtgagtgggatttggatattttttgagggtgggaattaggtagtgttttaagagatgttaggtgtataggggttgggggttgggttggggggagtataggtttttgggagttagaaggggattggggttgtggtttaggttatggatagagtagaggtgtagggatttgaagaagtagagggagaagtttggttaatatagtgagattttatttttatttaaaagataaaaattagttgggtgtggtggtgtgtatttataattttagttatttaggaggttgaggtaggagaattatttgaatttgggagggggatgttgtagtgagttgagattatgttattgtattttagtttgggtgatagagtgagaatttattttaaaaaaaaaaaaaaatagtgggaggtgatgtggtgttgtagaggtggtagtggttaggatagtgggaggggtatgggaggtgaggtttttaggttagttatgaatgttgggtttggttgtgttttaaggtttttagagttttttttttgtttttgtttggttttttaggaggggagttagggggtatagtttttgtaggggttggtaggattagataggggtaatgttgggttttttgtattgggattgaggtgtttttttgttttttttattggttgagattagggttttgggtatatgggagggatggggtttagttgttagtatggagtgggtttgtttgtttatattagtttttgggtattagttattaggagtttgtagaattgtggggagaaaaggtggatgaggtaggaggaaaagaggggagaggggtttgttggttgagggttttggagagtggtaggttttagtttttgtgggaggggtattttggtaggtgtgtgtagttgttgttagggtttttaggatgtgatgtgttaggattggtttttttggaggttatgttagtattttggtttttgtttttgtattttgttgttagtttagttagggagattttagtttttttgggaagttgtttttttgttttaggtttttttttggtttgtttttgtagtgttttttttgggtatttgggttttagttttggtttttgtttgtttgtttgttttttgtttttttatttttaatgttgtttgtttattttagggtgtttgttgtttgtttgttgtttgtttatttgttgtagtatgtttgagttgtttgtatgtaggttgttggatgagttaatttttgtttggtttagtattggttttatttggttttgttagtttttgtaggagttgtgtttttgagttttttttttagaggatgtaggttttttgaggttttgttttgtttttatgggttttagttttgtaggttaggttaggaggtttttatgttagtttattggtttgaggggggttttttttgattttggaatagaagatagggtaaggtagtttgaagtttgggttttgtgtttgttgtttttttagtgtggttttgtttgtttttgtttgggagttaattttagtgttattagtagagttatagtttgggttagttttggtaggtattttgttttggtttatttattttgtgggtgttgtggttttgggtttgttttttgggtagaagtgggaggaagtgtatatatttgttagggaggttttttggttgagggatattttaggtttttattttgtttttttgttagtgtagatttggggtttttttttttttgttagttttttttatttttttttaggttaggggatgagataagggattttgagaatagtttggggtgggagggagattttagtttttttagtttagtagggtagggggttgtgttagtttagtttgggaaatttaggaggggaaggtgagggttttgatttttttttggagtgttagatgtggagttgatattagttgggtgttgatttttttttttgttattggtttttatttttttagttttgtagtttttgttggttaatgatgggggtagttgtttgttatttttagagagttttttgtagtattttatgttttttgtttggttttgttatatgttggggtttttgttaattttgtttatattttgtagtatggagaggtgagttaggggtttagtagggttgggtgggaagtagtattgaggggttattgtgttagttttgggaggagggtggttaaattggtgggaattttggtatgggggattggggtggttaatttaaggttaggatttatttttattggtatttgttttatgtttttagtattgagattgattagaagttgtaggagattatgaagtagatgggttatttgattattgggggttaggtattatttttattgtggtggggagagggaggaggtttagttaggttggatttattttgggagtgttagtggggggtagggggtggtggtagaggttttagggattttttaattttttttttttttttagtgttattaggtagaaattaatgatttggagaatttgggtgagatgggtagtggtatttgtggttaggtgtggaagatgtgtttttggaagattggttatgttattgttgttaaggtgagttttggtggttattttggttgtgttttatattttaggttggtgttgaggtttttttttgtttttgtttgtgtagtaaatgtggtgttttgggaataaggaggagaataagtgtatttttatggatttggatgtggtgttgaagagttatgattgtttttatattgtgtagtgttttgggatgtttattattaatgtgagtatttggttgtgttttgtagtgttttttttttttttatttttgtttttttttagggagtagagtttttggggggtgggttggaagatatagtttttttgggtgtttttttttttgtagatggatgtttttattgttatggagtttatgggtatttgtgttgagaagtttaagaagtggatgtagggttttatttttgagtgtattttgggtaagatgatagtggtggtgagtgattaggtggggtttgtattgggtaggatgatagaggtggtgagtgattaggtggggtgtgtattgggtaagatgatagtggtggtgagtggttaggtggggtgtgtattgggtaggtggttttgggtttgtgttttttgttatatgtatttttttttgtgtgtttgtagattgtgaaggtgttgtattatttgaaggagaagtatggtgttatttattgtgatgttaagttttttaatattttgttggatgagtggggttagattaagttttgtgattttggtattagtggttgtttggtggattttaaagttaagatgtggagtgttggttgtgttgtttatatggtagtgagtgggggttttttagtgggggagggggtgggggttgggaggttggttttagttttggagatatgttttttttttttttttttgtagtttgagtgtattgattttttagattttattaagttggattatgatatttgggttgatgtatggagtttgggtattttgttggtgagttggggtttttttttgttttttagttaggagtgagggtttttgggggatttggagggaggagaatataaatttgtttagttttgtttgttttttttttaggtggagttggtaataggatagtttttttataagaattgtaagatggattttgaggtttttattaaagttttataggaagagtttttgtttttgtttggatatatgggttttttgggggatttttagttttttgttaaagattggtgagaatttttttttatttgggaggttagggatagtttgttgttttgggtagttggggaggtaatggtaggaggggaatggaggttgtattttgggatgggtggatgtgattgtgggtgggtttttggttggtggttgttataggagttggagttggtgtttagggagttatgagttgggtttggatttagtttgaggggatagttagttttgtggtatttggtggggtggttgttggagattgtgagtatgtttttgtaataagtatagttataagtttaggagggttatgtttgatttttttaggggagttttatttatttttttgggggattttagttagttttggttttttaagttaggtttttgttatttggttttaggttaggaggttttgggatttatagttgttttttgttgttagttggggttttgaggatatttatagtttttttttttatatatattttggggatttttggttttttggggagggtttgagtataggggtggggttggtattttttttttttttgtttttatatttgttttttttttttttgttttagttttattaaagattataggaagagattaaagtataataagttatttgtgagtatttgagtttttttagtttttgttttgtttttgtggaggtgtgaggttaggagggaagattgtttttttttaagttttatttttttgggtttataggaatatagttttattaagtgttatgagatgttggaggtggatgtggtgttttggtttaaggatgttatggtgaagattgagttattgtggattagtggtgttttgagttagttttatttgtttttttttaggtagttgtttggtggtggttagttttatagggggttaggggtatggttataggtttttttttttatttggttatttagttgtttgttaggggagatttgggatttggatggttatttaggattgaggatagagagtggggggtgtttatttattttttttgttttgggtttattaagtttttgttttttttattttggggttagttggttgtgtgtgttttttgatagatattgtgaatggaagatagtaggttgtgattagagttgttgtttatttagttgtagtttttgggttggggtggtttttaggggttaggagagagttttggagttttgtagttattatgtatgtttttagtgtgttgtgttttttgttatttttatgtgtttgttttttttttgttgttttttgttttttgttttatttttttgtttttgtttggtttttttgttattttttttgtttttgttttttttttggtttgagtttgggtttagttattttttgatgggttttttgggtttgtataggttttttatggtgtaatgagttagtggtttttagttaggtagtgtgggtattgttattgtggttggatggggttgtgtgtttgtgttttttttttttttttttttttttttttgattttagggggttttttttggagtttattgtattttattgtatttggtggggtgtttggggtgggggtggaggagagtttgtttttgtggggttgttggtatttttagaaatttttattaaagttatgattagttgtttgtggtggggttttaattgtttttgggtattggggagttgggttggggttgttgttttggggtttttgggggttatagtttggggtgagttgaagattttaggggatgtggaggggtttgtggggttttggttgtataggatggtttttagggaaggtggttttggggtatggtgtagagtaggtgattggagggaattggtgatggagtggggttaagggaggggtttggagggagttagggatggagggtagagggagtggatgtgggggtttgaggatgtgtgataagttttagtaggggtgggggttgggttgagggtgggggtgtgaggtggttatttttattgtgtttttggttgtttttttatttatttatatttggtttagtttatgttgaggtttaggattgggaaggattgggtgagtgtattggggatttaggttaggtgttttttggagtttgttggggtggttagagtaggagggggtgtgttttttttttgtgggtgttgtatgtaaattaagtggataagaaaaaataataaaataaaaaataagaaaaaaaaaatataaaattttgtaaaattataaagaaaatttaatattaaaggtgtagaagttggttggttgtggtgggggtagtgtaggtgtagtatttttttttttttatttagtttgttgatttttgttattattatgatatttataaaatgttgtatgtttaaaaagttatagatgttattttttttttgtttttagggaggaaagttatttttttttgttttttggtttttttgttaggggttaggggtttgttgggtgggggtgttaataggtttggttttttttttttttgtatttagttatgggggtttttgtgattgttggaaggttgtatggttggttttagggttagtataggtttgaggttgggttgtttggttttatttttatttaattttattttttgttttatgagtgtgtgtttgtttatttttattttttttagtgttaagtggggagttttgggggagttttttttgttttttagttttttttaagatttttttttttgttattagttatttttttggattaggtagagggtggattgggtgggtaggggtttgagggtggtttgggttagtttattagttaatggatttttttttaggttgttagtgttgttttgtttttttttaaaataaaatgtttttgtttgtaaatttttagatgtttgagaataaatttttttttttttttttattgagtttgtggtgtgttatgggtttggtagggtgaggtgggaagggggtggttgtggggggaggtttttgtattgaggggagattgaggtaggtttgggagttagatgggaggtgtttgtagtgatttgttgatgggtattaagtagttggtgtaagggattttttgtttttagtggttataggttgggtagtagaggattttttaatttttttaggttttgggtattggttttggtgttagttttttagtttgttatttttgttttttgtttttttttttgttaaggatagggttgtttgtttatgtgtgggatttgggtgtagtttagttggtgtttgttttggttttaaatattttgattttagttggtttagtatgttgggtattgtgttgttgttggttttgtttttagggattattattttatttagtgggttatttggtatgtatgggtagggaggtgatgggtttgttatgtttttatttttgttttattttttttattttttttgagatggagttttgttttgttatgtaggttggagtgtagtggtgtaatttttatttattgtaatttttgtttttttggtttaagtgatttttttgttttagttttttgagtagttgggattataggtatgtattattatgtttggttaattgttgtatttttagtagagatagtgtttttttatgttggttaggttggttttgaatttttgattttaggtgatttgtttgttttgaattttttaaagtgttgggattataggtgtgagttattgtgttttattgatgttatttttttttaattagatttttggtggtggtttttatgggggtggggatagggtaggggagtggggtggggtttttgttttttattttaagggtggtttatatttttattttggtaaagttttttgtagttatggagagggttagagttgtgggagggggttagtttatttaggtgttttttagaagtgggtgtggtgtgtggatggataagggggtttatgtttgtaattttagtatttaagagaggttgaggtgagaggattgtttgaagttaggagttttagattagtttgggtaatatagattttgtatggttgtggtagtgagtggttgtggttatagttatttgagaggttgaagtaggaggatggttggagtttaggaggtggaggttgtagtgagttgtatttgtattattgtattttagtttgggtgatagagggagattttgttttagaaaataagaaaaatggatgtgtaggtaattttttgtatttggagattagttgttttattaggattttgtttagtatttgaaggtagatattagtgtgtgtttaggggtatgaagaggggaggggttttatggttgttttagtttggataagtggaagtgttttagattttggtggtttggttgggttttggttgtgtttaggagagttttttgggagggtattttttttattttttttttttgttggtgatagtatttatttttttttagaaaggggagttgtttgttttgttgtgtttttaagagtagttttggggaaggtgggggagttttgattttatttagttggattttattattgggtgttttttattgttttttttttgttttagggagggttttgttagttttggaggtttttttaggggtgtatggttttgtaattggtttagttgttgggttgtgtgagttttaggggttgttagggggtatattattgttaggggggaaagtggtgtggagtttattatgggtgaattggttgttgtaattgtattttttttttaaaggtggtggtgggggtgaggtggttgggttattttttttggaggtttaaagggtagtgtgtgtttttttttttttgggttgtttttttttgttttgttagtttttttgttttttgtggtgtttggtttttggttgtgtagatttttttttagtttgaagttgtttgatatagaggatgtttttttttgttgtgtggggttgtttgaggttttggttgatagttgtgtgtttgtgtaggtggggattttggggatattaggggtggatgggggttggtggggatgggtgatttttgatggtgtttttgttttttaggtggttttggtttgtttttttttgtgttggggtttggttttgtattgttgtttagtgatgttgtttttatgtttggttttggggtttgttttggttttgttgtgtgagggttgttttgttgatatttttgttgtttttttgttattgttgttgttgagtttgggtgttgtttgttttgtgtgttttagtttttgtttgtgtttggtttttaatgttttggtgtagtttttgtattgttagttgagttgttgttgttgtttttggggagtttgttgggtgtttgtgtttttgatgttgttgttgttgttgttgttattgtgggtgtgtgggtgtagagtttggaatttgggtgttggggttttttgggggttgggtatgggtgattttggtagtggaaagaggatatttttggggtttgaggatttgggggttgggggaggtggggtgtaagggtttatttttgttgatagagtttttttggggatagtgtggatattgggtttttttatggatagttttggaattttttagggttgggggttggatgtagaaggttattaaggggatatatttttgggaatttggtgttgggttttatatgttaggtgttgggagatgtggattatgtgattttgtggggttgggatttggggtttttaggggttgggtggttagttatttgtatgtgtaggggttgggtttagggtattttaaggggttggatttttaggggttttattttggttgtggtggagagttggatttaggttttttttgggggttttggggattagagttatgattttggtgttttgatgtttttgttttttttttattttttttttttttagtgtttgttttaggatgaggtgtgtgttgatattggtagtggtagtgttgagggtttggttgttgatggtttttatttgtatatgttgatgtagtttattgtggttattgtgttgtggttgttttttagtgagtatgtagtttttttttgtatggggttgtggggtggtagagtgggtgggaaggatgtttgggagttggatttagttttagtgtggtattttttatagggttgtttaagagtgtttttggttgtgtagtgtgttttgagttttttgtgttggtttttgtggttttggaatttgtgttggtggtggtgttggtgttggtagtttttgtgttgggtgttgtgttggttgttgggttgggttttgtttgtgtgtatttaggtattgatgatttttgttaagttgggtttttagtttaattttgtgtgttgggatttggggtggttgtgattttgtttgtggggtttgattaattttagttaggtttgtttttgtgatgtttgtagtagtttttaggggttgtttttagtttggtgtggtgtgtagtagtttttttgtagtttgttttttttttttagtgttttatgtttttggtttgtttgtgagagttttgtttagtggtttttagtttaggaggttttagtgaggaaggtaggtatggaggtggagggagttgggtgaggtaggagatttgatagtgatgttttttagtgtttagtttgtgttaggtattgtggtttttttgtttgtttgtttgtttgtttgtttgttttttgagatggagttttgtttttgttgtttaggtgggagtgtaatggtgtgattttggtttattgtaatttttgttttttgggtttaagtgatttttttattttagttttttgagtagttgggattataggtatgtgttattatatttggttaattttgtatttttagtagagatggggtttttttatgttggttaggttggttttgtatatttgattttaggtgattttattgttttggttttttaaagtgttgagattataggtgtgagttattgtgtttagtttttaggtattgttgtaaatgttttatgtttatgaattaatttaatttttttaatttttaggtggatattattataatttttattttagagatgagaatgatgaggtattttttgaattaagtaatttgttaaaagttataatattgggtggagtttggatttgaatttaggtagtgggttatttgtggtaggtgtgggttttgggttgagttaggggtattaggtgaggagaggtattaggtgaggagaatttagtatttggatttggtttttatttttattttggtatgtagattgatggaagaggttagtggtttgttgggaagggaggtggtttgtgtagtgtttttttttttgttgagttttagttattttttttagggatggtgtgtttttaatatggtttggagatatatttagttattaatttgggattaggattaataggattggatttgtttttttggattttggatttgatgaggttatgatttttgtgttttttttttttttttgttttttttatttgtgtttaaaataaatttttggattgattggttaagttttggtgtagttagtgagtgtgtaatgtgtggggtgggggataggtggggaggtttggggagaaagttgggagtaggatttggggggtatttttgagaaattgtgatttataggggtggagtttggggatggggtttatatgtttatatatttgtgtgtatttttaggttatgggagattgtagggtgttttgttttaaatagaaagtgatatttggttgggtgtggtggtttttgtttgtaattttagtatattgggaggttgaggtgggtggattatttgaggttaggagttttagattagtgtggttgatatggtgaaattttgtttttattaaaaaaagtaataaaaaaagaattagtagggtgtagtggtgtgtgtttataattttagttgttggggaggttgaggtaggagaattgtttgaatttaggaggtagaggttgtagtgagttgagattgtgttattgtattgtagtttgggtaataagagtaaaaatttgtttaaaaaaaaaaaaaaagtggtatttaattttataagtgtaagtttaaaataaatttttttttttttttttttttttatttggatatttgtttatttgttttttgtgattttttttaagttaggttttttttgttttttattatttttgtttggattttgttttagttttgttttgattttttgtttttgttttagtttttttttggtttggattttgttttttttttagattgttagtttagtttagagttttttaaattttttttgtttgagttttattttattttatatagataagagtgggattattagttttagtttatagaggaggaaattgaggtttggtaaggttaaattatttgtttaaagtttttaggtttgtttgattttagagtttaggtttttgattgattggatttttggatttgattttttggttagaatttatttttttgtgagaagtaaagtatatagtagtagttttatgagttagtttagtaatagagggagggtatgggatttaaggtgttgtttttattttatgaatgagataaagtgtaggttgagggttttttttgttttgttttagttttggtgttgattttttttttatttttattggggtggttttttgggtttttaaatgtgaagttatgtttttatgtgtgtttgtttttgtgtggttttttttgattttggtggtttttgtagttttgtttattggagaagtgattttatagtgtttgtttttttttgagtggtatgaagttattttttaggtggtgagtggttttggtgtgttatttgggtgaggtgattggttttgtgatttggagtgtttgtgagaagtggtagttagtgtgatttttgtaggtgtggtagggttagttggagttggatgttattgagttggtttgggagttgtggggttggagtgaggttgaggtgagatgtggtttttgggattggagttaggttggaggtggggttggggtggggtggagagtgggtggggttgtggtaggagttagtggggtggggttaggaatgtaagtgagtgggggtgtggtgtggggttgagtggtggggtgttagtgggtgagtttgggtggggtgaggggtggggtgtggatgggaagagaagatttaggggtggggtgagtttgggagttagatgtgggtggggtataagtgaagtggaggggtggggtgatgttgggggtggggtgtgtgtgttgttgaggtttggagagtgggtgggtgagtttgaggggtaggatgagtttgggggtggggtgtgggtgggttaatagtaagatttaagggtggggttgttttgggagtaaggtgtgggaggggtgtgggtgggatgagggtaagttttaaaggtggggtgagttttggggtaatgtgtgggtgaggtgagggttaaatgggtggaatgaattgggagtaagatgttgttgagtttgggtgaaaagtaatgtatgttgttggataggatatgagtttgaagtgagagggaatagagaagaggggatgaagaagggagttgaatggggtagtagttagtatagggttgggttttggttgtgtgaaggagttggaattggtttgggttttataatttttttaggtagttggttatgttttgggtggggtaggggttttggtagttattgggatttttaatattgggttagtaggagattaaggtgtagtagtggggtttagagtatataagggattgggttttggtttttttgttgtagttttgagtttatagaagttttattttgttgttttttttttttttagatttgggtttttttttagtagtttaagggttgtgtagtttgggaggttatttagaaagtgtatttgggtggtttttagggattaaggtgttgggaggtatagtttttagtttttatagaggtgaggtagatgaatagggtgaggttgtttagggtaggtttttggtgggtaggtgggagttgtgggggataatttgattaggggatttttaggaggagtagggtttggggggttattgtaggttgatttttgggttgattttgtatttttggttttatttaggtttggatggatttggttgagaagataatagggttattggaagaagttttggtagtggtttttttgtaggtattgttatttttttaggtaggttagggtgttttagaggatagggttatatgggttaaattatgtgaatttgggttttgggtttttttgttagttttgtggattttgttagttattggatattttgagttttagtgtttttggttttgaggttattttttgtttgaggagtattttagggtggtagggaggatgggggaatgtgtagatggtgagaagattttttagtttttttttttttttgattgttttgtttgttaggtgtttattattgtggttatggaattggttatttttttgtattttaagttttttaagtttatgtaggtttgtggaaagtttttgtttttgagtgtttttggaggataggaagattttgtttttgaaatatttagttttgtttttgttgtatttagttttgtatttaggatttttgattttgtttttgagaaattttttgagttgttggttggtttttttattgaagaagattttgttgtggattttgagaagatttataagtatttgttttttgttttttgaagtggttgtagttttgagtttttagtagttggtgagaagggtgagggagggggtaggagtagagggattaagggtttttggtagtaggtaggggtgtttttttattttttttttttatttattattagagtttgttgtggtttttgatttgtttatgttatttttagaggagttgttatttttgttttgtatagttttggttgagtatatgatggagatgtatttatgtttgatagttttttagtttatttttgttggagggagtttggggtttgtagtagaaggggatggggttggttttaaggtattagaggagatttttttagttattgagaaggttgagtatagtgaattgaaattgttttggtaagtagttgggatttgttttttgaatttgtttttggtgtttttggagtttttgggttgggtagttatttttgttaggtgaggggtatggtgggtaggaggttatattaggttttttgttttgttttttggttttgtttggttggttttggttttttttgaggattttgttatgggggaaggtttttgagatgatgtttagttgtggggtgggtttttaagatgttttatattttgggggttttagaaatggaatttttgttgtataggggttgggtgggggttgtaggattttatttataagttttttgatgttaaggataggtggatagggttggttttttttagtttttaagttttattgtgttttgttgtttgttggggggttatagttggtattgtttattgtaaaggtttttgtatattttttttttttttgtatattttggggttagtatttttattttttttaattgattagttgtggttattttttgttgttaggttttttttttttttgggggtattttgtgattatgaataaagttattatttttttttttttttatttgtgatttaaagatggaagtgggggttttgaagtgttagagtttgggggttatagggttgggggtgtgtgttagggaggagagttgttatttgattggtgtgatgaggtttggggtgaggagttttttggtgattgtgaagttgataagtgtggatggggagagttggtagggtattttggggataggtgttagggatgggttttagagtagggtaaaattatattgtataggtggaggggagaaggtagtagagagtgggggtgatttggtggaaggagttgagttttaggttgggtggttagaggaagatagataggggtgggttgttttgagtggtaggaggttagtgggagtggagtgttttttggggtggttttgggattttaaggatttttagaaggtggggagggaggggtattggagttagggttgattttaaatttttgggggtgttgggattttgtttgaggttttttttattagttttatttgttttgtgggtgtggattgagggttgggttttagagagggaagtagatgtttttttatggtattgtgttttatgtttagttagtaatttaagttggtaaattttttgtttttggagtttgtgtatttatttagtttgttttttatagaaatgtttatttttttttttatatattgtatatggtttttttggggtgtatattttttgggagggttttggagtatagttagtttattttgtttgtggttattgttttattgtattagatttataaatgttgttaatggtggtgggtagggggaggaggtttaggttgtaggtatggttggttgttggagtttttttttagggttggtagagggtgtgttttttagttttttatagggttgagttttttttattatttttggtgtttttttagattaatagaattgtgtgtggaggggaggtagttgggggttatatattagtttttttttttaaagttggtgaaaggtgtttgtgattttggtgtttttgtagttttgggaagttttaaaaatatgtaaaagttagatttgggttttatttttagttttattagattttagttatgtgattgtgggtaagttagttattggagttgtttggtttttggttttttggtttgtagaatagggatgttaatagggtttggtttatttttatgattttgaagaggagataggttataaataggaggtgttaatttagtatgttatttggtatgtagtaagtgtttaataatagtttttattattatgtttggtttagaggtagggaggagtggaatggtatgggagggttgtgggaggtatggtaggggggttaggggtaagtggtaggagggtggatggggggtagtggtgggtattggggtagggtgtgttgatttgttttggggtttgggttgggggtagaaatgagtttgtttatgttgttttgttatggtaggtgttatgtatttttgatatagttgttatggtaggtttttgggttttgtttttgggataggtggtgtagggtaaattggtatgtagtgtttgttttgtgggtttgggagagtttgttttgtagggattagagtttaaggatgggtttaatatttagttaaggtggggttgatgatggttagataataggggagggaggagggataagggggtttttatttttagggatgtataatagtagagttatttatatgttggggagggggtggtgtgggggttttttttttgtttgggatttagagttgggggtgggggttagttgggtgggtgagatgtgtagagaggaagggatagggtggataaaggtatgaggtggggttttggttaggttaggaagggatatgggaggggttttgagggggaggggttgggttttttttaatttttttttttttttttttgggttgggggttttggggtgggattttgagtgtagttttggttttgtggtgttttttgttgggttggttttttgagattttggtgtagggttggttagggggtgttgtgttttttatattaatgtgtagttgaattgtttgtgtttgagtgtttttttgtggttggtttaggatgaggtgggtatgtggttgtaggggttgagtaggatgtgtatgtagtgtattattaatagtattagtattatgagtaggtagagtatgaaggtgaatattgtgtgttgttttgtgtttaggtttgtgtttattgggggttttgttgatggtggtaggggttttggtgatagtgtttatgttgtgtttatggtttatattgttgtgtgttttgtggaggaggggatttgttttgggtgttggggatgaggttgtgtttttttttttgtgttttttttgttttgtttttttttgttgttgttgttgttgttttttttaatgtgtttgattttattttttgtttgtgttttggtttttgggttatgtttatgtttggtttgttggattgttgttattattatgtggggatttaattttggttgtgtgtgtaggtgggggtgttgagagttgggaaatggagttgtgtttggtttgggttgtatataataggtgtgaaagtgtggttgtggtttgggtgtgtggtgtggggatggtttttgtggtttttgtttttgttttttttgtttttggtggtttgggatttttttttttattgtttttgttttggtgtgttttttattttggttttgatttggatggggattgattgtttggtggttgtgtttttttagggatttgtgttggttgtgtgtttggtttttttttggtggtggtggtggtggtttgggttttggtttagtttattttatttgtttttggagtggtggagattgaggtaggtaagtagtgtgtgagttgggttgttgtggttgtttttatggtgatgggggtggggttgttgtggggggtggggttgtagggggtggaggttgtgtagggagtggtgtgtgagttagtgattttgtttgggtttgtgggaggatggaattttagttttgaggatttgtgagtatttatgattttgttggggagtgggtagttgttatttttattttttttggtattttgggttttttagtttgttttgtgtttgtatttttttttgtgatagattttatttgagattttttgtttgtggggggattttagtggttttaaaatatttatatgggtatttaagtttttttggttttggggattttaatttttagagagtttaggtaggttattgggatgagtaagtttttttagttttgtttgttattggttttgttttttaatttagggtttagttttgggtaaggtgtttatttattgtggttgtagttttttatttgattttgattgttttttatagtagttgtttgtttttatttttattattgttttggttatttttgtgttagagaagatattttagattttgtagttgtttttttgtaatttggtgttttattttttttaaattttaggtttatgtataagatggaagagtattgttaaaattaaaaaatggatttaaagtggtttggttgatgtggttagtgggttattgagttgtgggttttgggttttattttgttgtggggggagtttttgggttttggggttttttggtattgtgtgatttgtgtgtattttaggtgattaggtgttgggatttttgtagggtagagtaatagggtaggggttggttttgtgggggagtgtttttagttgttgtgtatttgtaatagtttgttgtttttttttgggttagttggttttgtagttgttttggtagagttgggggtagagtttgtagttttgtttttagaggtttggagttgttgtaggtggtgttgtggtgtttttgtgtttgatgatttaggttggggttatttggttttggtattatatttagagaatttgtttggtgttggaggttgagatgtttaggagttgttaggttgtgtaggggttgagtttgttttggttttggtagagtgtttatatgtatagtatttgtagtattttgttttgtagggtggggtgggaagggtattgttgagagggttgaggtgatttaggtagttttgggggggggttaggttttgtggggtaggagttattggtaatttttttaggggttgggagtagaggttagtataattgtttagatttaggaattatttagttttggtaaaaatagataggtttgttggtttttgattttttttaattttaaattttggtttagaggtttttttatatttttatttagttttagagttttagggttttgagttggggtttttgttaggtggttatatatagattttggggataggtggtgttatgtgtttgttttattttatttttttatttattgggttattttttattattttgtttttggggtttttgattattattattagttgtgtttggaaggtgatgattagtattggtttttgttttattattttgtttatggttagttgtagaggggttgagaggggggatgtgttttagaggatagtttggttgtttttttggaggtgaaatttttgtgtttaggttttgttaggagaaggttttagtattaggtttagtattggtttttttttgtgggttttgttttttaggttaggattaggttttttttgagattttttttttggataagtttaagattttttggattagtttatggtttttagtttttggtaaggttattttttgggttttgtttgggttatagtttttatttttgatggtggtttgggtttttattgtgaggtgtttatgttgatgttgttaatgtttaggatgtgagaatggaattggagatttagtgttttggtttgttggatggggtgggttagttggttgtaagtttgtaatgagaggttgatatgtttgtgtgatgttatttagggtgggtattatgttatatagagttgttgtttatatattttggtgtttaggtgttttgttgttagttagtaatggtagaggttaagaatttaggtttaagtggggaggtaggtgttatttatttattggtttagattatatgttttttatttttgggaataatattttatttagatgatttaatgaaaataggattaattagtaaagtgggtgatttttttggaataaaattttaaatttatttttagggttaagttggtggttttttggttgatttttaatatttttatatttgttgtattttgaattttggtttgagattaaatgttttttttaggatttgtttttagtttgaggttgtttttgttattgattagtttttagtg

SEQ ID NO: 304 - DNA, 22355 bp, Artificial Sequence
  chemically treated genomic DNA (Homo sapiens)
tattgggggttggttagtgatagaggtagttttaggttgaggatagattttagaagaggtgtttgattttaggttaagatttagagtgtggtgaatatggaagtattaaagattagttaaggggttgttagtttagttttgggagtagatttgggattttgttttaagagaattatttattttgttgattaattttgtttttattgggttatttggatagagtgttgtttttaggagtgggaagtgtgtgatttgggttagtaagtgggtggtatttgtttttttatttggatttgggtttttggtttttgttattgttggttggtggtagggtatttgggtgttagggtgtgtgggtagtagttttgtgtggtgtggtgtttattttgggtggtattatgtaggtgtgttggttttttattgtagatttatagttagttggtttattttatttagtaggttaaggtattgggtttttagttttatttttgtattttagatattgataatgttgatgtaagtattttgtagtgggggtttgggttattattgggggtgggaattatggtttagataaggtttaggaggtggttttgttaggggttgggggttatgggttgatttaagaggttttgggtttgtttaaggggagggttttgagggaggtttggttttggtttgagaggtaaggtttatggggagggattggtgttgggtttggtgttggagtttttttttagtagggtttaggtgtaggggttttatttttaggggagtagttgggttgttttttgaggtatatttttttttttggtttttttgtagttggttatgggtaagatgatggagtaggggttggtgttgattattattttttaggtatagttggtgatggtggttaggaattttaaaggtgaggtggtggagggtgatttggtgagtgagggagtgggatggggtaggtatatgatattgtttgtttttaagatttgtgtgtggttatttggtagagattttagtttagagttttgaagttttgggattgggtggggatgtggagaaatttttgggttagagtttggggttgagggaggttggagattagtagatttgtttgtttttattaaggttgagtggtttttgagtttaggtaattgtgttggtttttgtttttagtttttggggaagttgttggtggtttttgttttatagagtttggtttttttttagagttgtttgggttattttaatttttttaatagtgttttttttattttattttgtaggataaggtgttgtggatgttgtatgtgtgggtgttttgttgagattaggatgagtttaatttttatgtggtttggtggtttttggatattttggtttttagtattgagtagattttttgagtgtggtgttggagttaggtagttttggtttgggttattaggtatagaggtattgtaatattatttgtggtaattttagatttttgggaataagattgtgggttttgtttttagttttgttaggatggttgtaagattagttggtttgggaggggataatgggttgttgtgggtgtgtggtagttggagatatttttttgtagggttaatttttgttttgttgttttgttttgtaggggttttggtgtttggttatttggggtgtatataggttatatagtgttaagaggttttagggtttagggattttttttatagtagggtgggatttgggatttgtggtttagtggtttgttagttatgttagttaagttattttaggtttattttttaattttaatagtgtttttttattttgtgtataagtttgagatttggaaagaataaaatattgaattgtagaagagtagttatggagtttgaagtgttttttttggtgtgggagtggttgaggtgatggtgggggtgggagtaggtggttgttgtgggaggtggttaaggttgagtgaggaattgtagttgtagtgggtggatgttttgtttagggttggattttgagttggaagatgaggttagtgatagataaaattagggggatttatttattttagtgatttgtttgagttttttgagaattgaggtttttagggttgggggagtttgagtgtttatatgagtgttttagggttattgaggtttttttataaatagggagttttgagtggggtttattgtggaggagaatgtaggtatagggtaggttggggggtttgaagtgttaggggaggtgggagtggtagttgtttattttttggtgaggttgtgggtgtttgtgggtttttggggttggggttttgtttttttgtaggtttgggtggggttgttggtttgtgtgttgttttttgtgtagtttttgttttttgtagttttgttttttgtggtggttttgtttttgttgttataggaatagttgtggtggtttggtttgtgtgttgtttgtttgttttggtttttgttgttttaggggtgggtggggtgggttgagttggagtttgggttgttgttgttgttgttggggagaggttgaatgtgtagttggtgtgggtttttgagagagtgtggttgttgggtggttggtttttgtttgggttgaagttagggtgaggggtgtgttggggtgggggtggtgggggagggggttttaggttgttgagaataaagggagtgggggtaggggttgtggggattgtttttatgttgtgtgtttgggttgtggttgtgtttttgtatttgttgtgtgtggtttaggttgggtgtggttttgttttttggtttttagtgtttttatttgtgtgtatggttagagttgggtttttgtgtggtggtggtggtgatttggtgggttgggtatgggtgtagtttggggattgaggtgtgggtgggggatggggttgggtatgttaagggaggtggtggtggtggtggtaggagggggtgaagtggaggaggtgtgggagggagggtgtagttttatttttggtgtttggggtgggtttttttttttgtagggtgtgtggtgatgtgagttatgagtgtgatgtggatgttgttgttggagtttttgttgttgttgatggggtttttggtgggtgtgggtttggatgtggagtagtgtatggtgtttgtttttgtgttttgtttgtttgtggtgttggtgttgttgatggtgtgttgtgtgtgtattttgtttgatttttatagttgtatgtttgttttgttttggattgattataaggaggtgtttgagtgtgggtagtttgattatgtgttggtgtgaggggtgtggtgttttttagttggttttgtgttggggttttagagggttggtttggtggggggtgttgtggggttaggattgtgtttaggattttgttttggagtttttagtttgggggagagggggagggagttgggagaagtttagttttttttttttgagattttttttatgtttttttttggtttggttggagttttattttgtgtttttatttgttttgtttttttttttttgtgtattttatttgtttggttggtttttatttttgattttgaattttgggtgggaggaggatttttgtattgttttttttttagtgtgtaagtggttttgttattgtgtgtttttggaagtggggatttttttgtttttttttttttttttgttgtttggttgttgttaattttattttgattgagtgttgagtttgtttttgggttttggtttttgtggggtaggtttttttgggtttatggggtggatgttgtatattaatttgttttgtattgtttgttttggagatggagtttgaaggtttgttatggtggttgtgttgaggatgtgtggtgtttgttgtggtgggatagtgtgggtaggtttatttttgtttttaatttgggttttaggataggttagtgtgttttgttttggtgtttattgttgttttttatttgtttttttgttatttgtttttgatttttttgttgtgttttttgtagtttttttatgttgttttatttttttttgtttttgagttgaatatgataataaaagttattattgagtgtttattgtatgttaagtagtgtgttgagttggtattttttgtttatagtttgttttttttttgggattgtgagaatgagttaggttttgttagtatttttattttataggttaggagattgagggttaggtagttttagtgattgatttgtttatagttatatggttagagtttggtagggttggaagtggaatttaggtttggtttttgtatgtttttaaagttttttagggttgtaaagatattaagattataagtattttttattggttttgggggggggggttgatgtgtaatttttagttgttttttttttatatataattttgttgatttggggaggtgttgggggtggtgagagagatttagttttgtggggaattgggaggtgtattttttgttagttttggagggaggttttgatgattgattgtatttgtagtttaagttttttttttttgtttattattattggtagtgtttgtgggtttggtgtggtggggtggtgattatggatggagtgggttggttgtgttttaaggtttttttaagagatgtgtattttaggggagttgtgtgtagtgtgtggggggaggaatgagtgtttttataaaaggtaggttgggtgaatgtataggttttgagaatggagaatttattgatttggattattagttgggtgtgggatgtggtgttgtgggaggatatttgtttttttttttaggatttgatttttggtttatatttatagggtaggtgaagttgatggagggggttttaagtggggttttagtatttttaggggtttggggttagttttgattttagtatttttttttttttgttttttagggatttttgaggttttaaagttattttaggggatattttatttttattagttttttgttatttggggtagtttatttttatttatttttttttaattgtttagtttggggtttaattttttttattgggttatttttattttttgttgtttttttttttttatttgtgtgatgtgattttgttttattttgaaatttatttttgatgtttgtttttaaggtgttttgttggttttttttatttatatttgttagttttatagttattaaggggttttttattttaggttttattatattagttaggtggtagtttttttttttggtatatatttttagttttgtgatttttaagttttgatattttagggtttttatttttatttttaagttataggtgaaagagaaagagaatgataattttatttatggttatagaatatttttgggaaggggaaggatttggtagtagggagtaattatgattggttagttgaagaaggtgaggatgttggttttgaggtgtataggaagggggaaaatgtgtgagggtttttatggtgggtagtgttagttatggttttttagtagataataaggtatagtggggtttggggattgggggaggttagttttgtttgtttgtttttgatattaggaggtttgtgagtggagttttgtaatttttatttaatttttgtataatgggggttttatttttgagatttttaaagtatggggtattttagaggtttgttttatagttgagtattattttaaggatttttttttatgatgggatttttagaaagagttagggttagttgagtagaattgaggggtagggtggggggtttggtgtggttttttgtttgttatgttttttatttggtaggggtggttgtttgatttagaagttttaggggtattaggaatgggtttaggggatagattttagttgtttgttaaggtgattttagtttgttgtgtttggtttttttggtggttgggggggttttttttggtgttttggagttagttttatttttttttgttgtaggttttaggttttttttagtgggaatgggttggggggttgttaggtgtaggtatgtttttgttatatgtttaattagggttgtgtagggtaggagtggtagtttttttggaagtgatatgagtaggttgaggattatagtggattttagtgatggatggaggagaggggtaaggggatatttttgtttgttgttagggatttttgatttttttgtttttgtttttttttttattttttttattagttgttgagagtttggggttgtggttattttgggagatagaggataagtatttgtagatttttttaaagtttatagtaaagttttttttagtggagggattagttgatgatttagaaggttttttaggggtagggttaggagttttgggtgtggagttaggtgtagtaggggtagagttaggtattttaggggtggggtttttttgttttttaggggtgtttaggagtaaaggttttttatgggtttgtgtgggtttggggggtttggagtgtaggagggtgattggttttgtggttgtgatggtgagtatttggtaggtagaataattagggaggaagaggagttgggaagtttttttattgtttatatatttttttattttttttgttattttaagatgttttttagataagagatggttttagagttagggatattgaggtttgaggtgtttagtgattgatggagtttatagagttggtaaaagggtttaggatttaggtttatatgatttggtttatgtgattttgttttttgggatattttgatttgtttgggggaatggtggtatttgtgagaaagttattgttagggttttttttagtggttttgttatttttttagttagatttgtttagatttgagtgaagttagaggtatagggttagtttagggattagtttgtaatggttttttaagttttgttttttttggggattttttaattaggttattttttgtaatttttatttatttattagggatttgttttggatagttttattttgtttatttgttttatttttatgggggttgggggttgtgttttttggtgttttggtttttgaaggttatttggatgtattttttgaatggttttttgggttatgtggtttttgagttgttggaggaagatttggatttagaaaggaaagaggtggtggaatgaggtttttatgagtttagggttgtagtagagaagttaaagtttaattttttgtatgttttgggttttgttattgtgttttagttttttgttggtttggtgttaggagttttagtgattgttaaggtttttattttatttagagtgtgattagttatttaaggaagttgtaaggtttaggttagttttggtttttttatgtagttagggtttaattttatgttgattattattttgtttaatttttttttttgtttttttttttttatttttttttattttaagtttgtattttgtttaatagtatgtgttgttttttgtttggatttggtagtattttatttttagtttattttgtttgtttagtttttgttttatttatgtattattttgaggtttgttttgtttttaaagtttgtttttattttgtttatgttttttttatgttttatttttaaaatggttttgtttttaagttttgttattaatttgtttatgttttgtttttaggtttgttttgttttttaaatttatttatttattttttaaattttagtggtatgtatgttttgtttttggtattgttttgtttttttgttttatttatgttttgtttatgtttagtttttaagtttgttttgtttttaggttttttttttttgtttatgttttgttttttattttgtttaggtttatttattaatgttttgttatttagttttatgttatgtttttgtttgtttatatttttggttttgttttgttggtttttgttgtagttttgtttattttttgttttattttagttttgtttttagtttggttttggttttgagaattgtattttattttagttttgttttggttttgtagtttttgggttagtttggtggtgtttggttttggttggttttgttgtgtttgtaggagttgtattagttgttgttttttgtgagtgttttaggttgtgggattggttattttgtttagatagtgtgttggggttgtttgttgtttgggaggtggttttatgttgtttagaaagaggtaggtgttgtaaggttgtttttttgatgggtggagttatgggggttgttgaggttagaaagaattgtgtggaggtggatgtgtgtgggggtgtggttttgtgtttggaggtttggggaattgttttaatggaagtgaaggggagattggtattggaattggggtggggtgaaggagatttttagtttgtattttattttatttatgaagtggagatgatattttggattttatgttttttttttgttgttggattaatttatgaagttattattgtgtgttttgttttttgtagaggggtgggttttggttgaaaggttaagtttgaagatttagttggttaagagtttgggttttggggttagataggtttggggattttgggtaagtgatttagttttgttgagttttagtttttttttttgtagattggggttgatagttttatttttgtttgtgtaaggtagagtggagtttgggtaggagggatttaaggagttttagattagattgataatttaagaggagggtgaagtttagattaggagggaattggagtagaggtagaaggttgaagtggagttagggtagggtttgggtgggggtaatggagagtggagaaggtttggtttgagaaagattgtaggaggtagatgggtaggtgtttgggtaaggagaggagggagggggaaggtttattttaaatttatgtttgtggggttgggtgttgttttttttttttttttagatagatttttgtttttgttgtttaggttgtagtgtaatggtgtgattttggtttattgtaatttttgttttttgggtttaagtgatttttttgttttagtttttttagtagttgggattataagtatgtgttattatgttttgttaattttttttttgttattttttttagtagggatggggttttattatgttggttatgttggtttggaatttttgattttaagtgatttatttattttggttttttaatgtgttgggattataggtgggagttattgtgtttggttgggtgttgttttttgtttgagataaaatgttttatagttttttatggtttgggagtgtatatgggtatatgggtatatgggttttgtttttaggttttatttttgtaagttatgattttttaggaatattttttaagttttgtttttagttttttttttaagtttttttatttattttttattttgtatgttgtgtgtttattgattgtattagaatttagttggttagtttagaggtttattttgagtataggtgggagggatagggggaggagagaagtgtaggggttgtggttttattaggtttgaggtttagggaggtgggtttggttttgttggttttggttttgaattggtagttgggtgtatttttggattatgttgggggtgtattatttttgggaggggtggttgaggtttagtgagggaggggatgttatgtgggttatttttttttttagtagattattagttttttttattggtttgtatgttggggtgagagtgggagttgggtttgaatgttgagttttttttgtttagtgtttttttttatttaatgtttttggtttgatttaaagtttgtgtttgttgtgggtgatttattgtttgagtttgaatttaagttttatttagtattgtgatttttgataagttatttaatttagagaatgttttattatttttgtttttaaaatggggattataatagtgtttgtttagaggttaaggggattaagttagtttataggtgtaaaatatttataatagtgtttggaggttgggtgtagtggtttatgtttgtaattttagtattttgggagattgaagtggtaggattatttgaggttgggtgtgtgagattagtttgattaatatggagaaattttgtttttattaaaaatataaaattagttgggtgtggtggtgtatgtttgtaattttagttatttaggaggttgaggtaggagaattgtttgaatttgggaggtagaggttgtggtgagttgagattgtgttattgtatttttgtttgggtaataagagtgaaattttgttttaaaaaataaataaataaataaataaataaataaaaaaattatagtgtttggtatgaattaagtgttaggaagtgttattgttagattttttattttatttagttttttttatttttatatttattttttttattgggattttttgggttggggattgttgggtgaggtttttgtgggtgggttaggggtgtggggtgttggaagggagaggtgagttgtagaagggttgttgtgtgttatgttaggttaagggtggtttttgggggttgttgtgggtattgtggaggtaggtttagttagggttgattaggttttgtaggtgggattgtggttgttttgggttttgatgtgtgggattagattgggggtttggtttggtggaggttgttggtatttgagtgtgtatagatgagatttagtttggtggttagtgtggtgtttagtatgaaggttgttaatattagtgttattattggtgtgggttttagggttgtgggggttggtgtgggaggtttagggtgtattgtatggttggggatatttttgggtggttttgtgggaagtgttatgttgagattgggtttagtttttaggtgttttttttatttgttttgttgttttatggttttatgtggaggaggattgtgtgtttattggggggtggttgtggtatggtgattatgataggttgtgttagtgtgtgtaggtgggggttgttagtagttaggtttttggtgttgttattgttagtgttggtgtatgttttgttttgaggtagatattgggggagaggaaggtggggaagagatggggatattagggtattgggattgtggttttggtttttagggtttttaagagagatttgagtttagttttttattatagttaagatgggatttttggaaatttggttttttagggtgttttgagtttagtttttatgtatataagtggttagttgtttagtttttaaggattttaaattttagttttataagattgtatggtttgtgttttttagtatttagtatgtgaggtttagtattaggtttttagaaatgtgtttttttagtggttttttgtatttaatttttagttttgaaggattttagagttgtttatgggggaatttagtgtttatattgtttttggagaaattttgttggtagagatggatttttgtgttttattttttttaatttttagatttttagattttgagagtattttttttttattgttagagttgtttgtgtttagtttttgaagggttttagtgtttggattttaggttttgtgtttgtgtatttgtgatggtggtggtggtggtggtggtgttagaggtgtaggtgtttggtggattttttggaggtggtggtagtggtttagttggtagtgtaggaattgtattgaggtgttgaagattgggtgtaggtggaagttgaaatgtgtggggtgggtggtatttgggtttggtggtggtggtggtgggaaggtgatagaggtgttggtggggtagtttttatgtagtagagttagggtgggttttggggttgggtgtgaggatggtgttattgagtagtggtgtagggttaggttttagtgtggggagggatgggttaaggttgtttgggggatggaggtgttattagggattgtttgtttttattggtttttatttgtttttggtgtttttggggtttttatttgtatgaatatgtggttgttggttgggattttgagtggttttgtgtggtgaggaaagatgttttttgtgttggatagttttaggttgaagaggggtttgtgtagttaggggttgggtgttgtggggaatgggggagttggtggggtggggaagggtggtttaaaggagagaaaatgtgtgttgttttttaggtttttgggaaaagtgatttgattattttgtttttgttgttgtttttggaaaagggatgtggttgtggtggttgatttatttatgatgggttttgtgttatttttttttttgatggtgatgtgttttttggtgatttttgggatttgtatagtttagtaattgagttggttgtagagttatgtgtttttagagaagtttttgaagttggtgaagttttttttggggtggaagagaagtggtgaggagtatttgatggtggggtttggttgggtgaagttagagtttttttattttttttagggttgtttttggggatgtagtaggataggtggtttttttttttaaggggagataggtgttgttattaatgaggaagggaagtgaagaggatatttttttaagaggtttttttgggtatagttaaagtttagttaggttattaagatttgagatgtttttatttgtttaggttgaggtagttatgggattttttttttttttgtgtttttaaatatatgttgatgtttgtttttaggtgttgagtggggttttggtaaaatggttaatttttaaatatgaaagattgtttgtatatttattttttttgttttttgagatagggtttttttttgttgtttaggttggagtgtagtggtgtgaatatagtttattgtagtttttattttttgggttttagttatttttttgttttagttttttgagtagttatgattatagttatttgttattatggttatatggggtttatgttgtttaggttggtttggaatttttggttttaagtgatttttttattttagttttttttaagtgttgggattataggtatgagtttttttgtttatttgtatattatatttatttttgaagagtatttgggtagattggtttttttttataattttggttttttttgtggttgtagggagttttgttgaagtggggatgtgagttatttttgggatgggggatagagattttattttatttttttgttttgtttttatttttatgaggattattattaaaggtttagttgaaagagagtgatattggtggggtgtggtggtttatatttgtaattttagtattttgaaaagtttgaggtgggtggattgtttgaggttaggagtttgagattagtttggttaatatggggaaatgttgtttttattaaaaatataataattagttaggtgtggtggtgtgtgtttgtagttttagttatttaggaggttgaggtaggagaattatttgaattggggaggtggaggttgtggtgagtggagattgtgttattgtattttagtttgtgtggtagagtaagattttattttaaaaaaaataaagagggtgaaatagggatagaagtatgatagatttgttatttttttgtttatatatattaggtggtttgttgggtaaggtggtgatttttgggagtagggttagtagtagtatggtgtttagtatgttggattagttgaggttggagtgtttggggttagagtagatattagttgggttgtatttaggttttgtatgtgggtaggtggttttgtttttggtaaggagggaggtagggagtgggggtggtagattgaggggttgatattagagttaatgtttaaggtttgaggggattaagggattttttgttgtttgatttgtggttattgggggtagggggttttttatattagttgtttgatatttattggtaagttattataaatattttttgtttagtttttaaatttgttttagtttttttttaatgtagaaatttttttttgtaattattttttttttattttgttttgttaggtttatgatatattatagatttggtggaagaaaaggaaggggtttatttttaagtgtttaagggtttataaatgagggtattttgttttaaaaaggggtagggtgatattggtggtttgaggaggggtttattggttggtgggttggtttgagttatttttaggtttttgtttatttggtttgttttttgtttggtttagagggatggttggtgatgaggggggaggttttgggagaggttgggaggtaggagagatttttttagggttttttatttaatattgaagggggtgggggtgggtggatatatatttataaaatagaaaataaagttaaataaaaataaaattaggtagtttggttttgggtttgtgttggttttgggattagttatgtaattttttggtaattgtagaggtttttatggttggatgtaggggaggaaagggttaggtttgttggtatttttatttggtagatttttggtttttgataaaggggttaaggggtaagagaaggtggtttttttttttgggggtagagagaagatgatatttatgattttttaaatatgtggtgttttgtgaatattatgataataataagagttaataggttaagtgagaggagagggatgttatgtttatgttgtttttattatggttagttggtttttgtgtttttggtgttggattttttttgtgattttatggggttttgtgtttttttttttttgttttttgttttgttatttttttttgtttatttgatttgtatgtaatatttataaaaaggaaatatatttttttttgttttggttattttagtaggttttggggggtatttggtttgggtttttggtgtatttatttggttttttttagttttggattttaatgtggattgggttaggtgtgggtgagtggagggatggttaggggtatgatgggagtgattattttgtatttttatttttagtttggtttttatttttgttggagtttgttatatgtttttaaatttttatatttattttttttgttttttatttttgattttttttggattttttttttggttttgttttgttattgattttttttggttatttgttttgtattatgttttaagattattttttttgaaggttattttgtgtggttagggttttgtagatttttttatattttttgaggtttttaatttattttaagttgtggtttttggagattttagagtagtagttttagtttagttttttagtgtttgagggtggttggggttttattataagtagttaattgtgattttggtaaaagtttttgaaggtattgataattttatgagaataagtttttttttgtttttattttaaatattttattaagtataataaaatataataaattttaaaaaggattttttgagattaaagagagagagagagagagagagagagtgtgagtgtgtagttttgtttagttgtagtggtaatgtttatattgtttggttgggggttattgatttattgtgttatgggagatttatgtagatttaggggatttgttaggaggtggttgggtttaggtttaggttagaagagagatagaggtagggagggtgatgggagagttagataaggatagagaggtagagtaggggatagagggtgatggaagaggaatgggtgtgtgggagtggtgaaggatatagtatgttgggagtgtgtatggtggttgtgggattttagggtttttttttggtttttgggggttgttttggtttagaggttgtggttgaatgaatagtgattttgattgtggtttgttgttttttgtttatagtgtttgttgggggatgtatatggttggttgattttggggtgggaagggtgggggtttggtaggtttggggtggggggggtgggtgggtattttttattttttgtttttagttttaggtggttgtttaggttttaggttttttttggtaggtagttgggtggttaagtggggaggggggtttgtggttatgtttttggttttttgtggggttggttgttgttaagtagttatttgaagaagggtaggtggggttggtttaggatgttgttagtttgtggtgatttagtttttgttatgatatttttgaattaggatgttatgtttatttttagtgttttgtagtgtttgatgaagttgtgtttttgtgggtttgagggggtggggtttaggaggagatggtttttttttttggttttgtgtttttgtagggataggatggggattgggagggtttaggtatttataagtagtttattatattttggtttttttttgtgatttttagtaaggttagagtaagagaagggaagatagatgtgagaatgagggaggaggggatgttggttttatttttgtgtttaggttttttttaaggggttaggggtttttaagatgtgtgtgggggaaggagttgtggatgtttttaggattttggttgatagtggggagtaattgtgagttttggagttttttggtttagggttaggtggtaagggtttggtttggggggttagagttggttgaggttttttagaaaggtgggtggggtttttttgagagaattgaatatggtttttttgaatttgtagttgtgtttgttgtagaagtgtgtttataatttttaatagttattttgttaaatgttatagggttggttgtttttttaggttaggtttaaatttagtttatggttttttgggtattagttttagtttttgtggtagttgttagttaggagtttgtttatagttgtatttgtttattttagggtgtggtttttattttttttttgttattgtttttttagttgtttagagtagtgggttgtttttgattttttaagtggagggaggtttttattagtttttgatgaaggattggaagttttttgagaagtttatgtgtttgggtagaagtgggggttttttttgtaggattttggtgaggattttaaagtttgttttgtagtttttgtagggaaattgttttgttgttagttttatttgggagggagatgggtagggttggataggtttatgtttttttttttttgagttttttagaagtttttatttttggttggagaataggggagggttttaatttattaatgagatgtttaggttttatatgttggtttggatgttatagtttggtttggtggggtttggggggttaatgtgtttgggttgtaggggggggaggagaagatgtatttttaaggttggggttggttttttagtttttatttttttttttgttggggggtttttatttattgttatgtaggtggtatagttggtgttttgtgttttggttttggagtttattaggtggttgttgatgttgaagttgtagagtttgatttggttttgtttgtttagtaggatgttggagggtttgatgttgtggtggatgatattgtgttttttttttaggtagtatagtgtttttataatttgtaggtatgtagaggggggtgtatgtggtagggggtatagatttaaggttatttgtttggtgtatgttttatttggttatttattgttattgttattttgtttagtgtatgttttgtttggttatttattgtttttgttattttgtttagtgtaagttttgtttggttatttattgttattgttattttgtttagaatgtgtttggggatggggttttgtatttgttttttgagttttttagtgtaggtgtttatgagttttatggtgatgaagatgtttgtttgtagggagaggggtatttgggggagttgtgttttttggtttattttttagaggttttgttttttaggaaggggtaggggtgagggaggaggagatgttgtagggtgtggttaggtatttatgttggtgatgaatgttttaaagtattgtatgatgtaggggtagttgtggttttttagtattatatttaggtttatgaggatgtgtttgtttttttttttgtttttggagtgttgtatttgttgtataggtagggataggagggagttttagtattggtttggggtgtggggtgtagttggggtagttgttaaggtttattttaatggtaatgatgtggttggttttttggaagtgtattttttatatttggttgtaggtgttgttgtttattttgtttaagttttttaggttgttgatttttgtttggtagtgttgggaggagagggagggttggagggtttttggggtttttgttattgttttttgttttttattggtgtttttaggatgggtttagtttggttgggttttttttttttttttgttatagtgaaggtggtatttggtttttgatggttaggtagtttgtttgttttatgattttttgtagtttttggttaattttaatgttggggatatggagtaggtgttggtggaggtgggttttgattttaggttggttattttagttttttatattggggtttttattggtttaattattttttttttagggttggtatggtggttttttaatgttgttttttatttaattttgttgggtttttggtttatttttttatgttgtggggtgtgaatagggttgatgggagttttagtatgtggtggggttgggtggggggtgtggggtgttgtggggagttttttgaggatggtgagtggttgtttttattgttggttagtgggagttgtagggttaggggggtgagaattagtggtagggaggggggttagtgtttagttggtgttagttttatatttggtattttagggaggggttgggatttttattttttttttttgggttttttgagttaggttggtatagttttttgttttgttgggttggaggagttggggttttttttttattttagattgtttttagggttttttgttttattttttgatttggaaagagatggaggaggttagtaggggagagggagttttaagtttatgttgatggagaaatgagatggggatttgaggtgttttttggttagggggtttttttgataggtgtgtgtatttttttttatttttgtttaggaagtaggtttagggttatagtatttataggatggataggttagggtggagtgtttgttagggttggtttaggttgtggttttgttggtagtattgaagttggtttttagataagagtgagtagggttatgttggggaggtagtgggtatgagatttaggttttaggttgttttgttttattttttgttttggggttagggagggttttttttgggttagtgggttgatatgagggttttttggtttggtttgtagagttggggtttatgggggtaggataggattttagggggtttgtattttttgggaggagagtttgggggtatagtttttgtaggggttggtgggattaggtggggttaatgttgggttaggtgggggttggtttatttagtagtttgtatgtgggtagtttgggtatgttatagtgggtgggtaggtggtgggtaggtagtaggtattttggggtgggtaggtggtattaggggtgggagggtaggagatagatagatagataggaattaagattagggtttaggtgtttagaggaggtgttgtagagataggttagagaggggtttgggataggagggtagttttttggaggagttagggtttttttggttgggttggtaatagggtgtaggaatagaggttgggatgttaatgtggtttttagaggagttaattttgatatgttatattttagaggttttgataatggttatatatatttattaaggtgttttttttataggagttggggtttgttgttttttaaagtttttagttaataagtttttttttttttttttttttttgttttgtttattttttttttttatagttttgtaggtttttggtgattggtgtttagggattaatatgaatagataaatttgttttatgttggtagttaaattttgttttttttgtgtgtttaggattttgattttagttagtaggaggggtaggaagatgttttagttttaatgtaggaggtttagtattgtttttatttggttttgttagtttttgtaggagttgtgttttttagttttttttttggaggattaggtaggagtaggggaagggttttggggattttgggatatagttaggtttagtgtttatgattggtttagaggttttattttttgtgttttttttgttgttttggttattgttgtttttgtagtattatgttattttttattgtttttttttttttttgagataggtttttgttttgttatttaggttggagtgtagtggtgtgattttaatttattgtaatattttttttttaggtttaagtgatttttttgttttagttttttgagtagttgggattataggtatatgttattatatttagttaatttttgttttttgagtagagatggggttttgttatgttggttaggtttttttttttgtttttttaggtttttgtgtttttgttttgtttatggtttgagttatagttttagtttttttttggtttttgagggtttgtgttttttttaatttagtttttaatttttgtgtatttggtattttttgagatattgtttagtttttgtttttagagagtatttgagttttgtttatattttgtatttagtggttgatgattatagtttttgaggagttttgtgggttttttttttgatagagtttattaggttttttgagggtggttttggagtttggggaggaggttgttggattatagattggagtatggggggatggaagggagggtttaggtaggtattgggggaaggaggtatataaaggttttgagaatagaggttatagaggtggtgatggttatatggtagtttaggagggtggagtgagagtaagagggtgaggatgagaaagagaatggatgagagagagtgagaggttggagggtatgtgtttgttgataggagttataggtgtattggttgttatgttaatatgtatgtatatgttgtgtaagtgtatgtatgtataatatatatttggggtatgttgtggatttaatatttatgtagttgggatagagttttttttgtttttggatatatatatttataattatttatagggttaggtattttatttatttttttttttaatataggtgtggggtatagtttgtatgttttatataggttggtgttgtgtttagagttttggtggttttgttttttttttttttttaatttttttaagatgttttttaaattttttttttttttgagatggagttttgttttgttgtttaggttggaatgtagtggtgtgattttagtttattgtaatttttatttaattttttatgttttttttttttttgagatggagttttgtttttgttgtttaggttgaagtgtaatggtgtgattttagtttattgtaatttttgttttttgggtttaagtggtttttttgttttagttttttgagtagttaggattatagttttttgagtagttgggattataggtatgtgttattatgtttggttaattttgtatttttagtggagatggggtttttttatgttggttagggtggttttgaatttttgattttaggtgagttatttgttttggttttttaaagtgttggaattataggtgtgagttattgtgtttggtttaatttttagtatttttaatgtagatagggttttattatgttggttaggttggttttgaatttttgattttaagtgatttattttttttggttttttaaagtattgaaattataggtatgagttattgtgtttggtttagtttttaaatttttgagataggattttgttgttatttaggttggggtgtagtggtgtgattatggttttttgtagttttaatttttttgagtgttgggattataggtgtgagttattgtgtttggtttttttagaggttttgtttaatttttattgtttttagaggtttttttaggttggttttttgtagggttgtttatttagttagaatgttttttttggtgggaatgtgttttttgtttagtgggtttttttattgtagttttttgttatagaggagaggggttttatttgttttatttattgttgtgtttttggtgtttagggttggtatggaatttggggggtgttatgtgtttattt

SEQ ID NO: 305 - DNA, 11000 bp, Artificial Sequence
  chemically treated genomic DNA (Homo sapiens)
gaaaggtgagtgttggttgaattttatttgattttagttattttttaggagtggtttggtgtagattataatatttgttatttatgtatttatgtatttttttttgaaaggagttgtagagtttttggaattttattttttagtgaggaaaattttttagatttttattgttttttggagggtgggggtagggttggtgaaaatatgagaaagtttttttggtgtattttatttgtttttatgtgtaaatagttgtatggttttttttttattaattttattagaaggtatattagtaataattaaggatgttataggaaaatgggaaggttgttttgtagattgtgtgttttgtataatgatttggggagtgaatgggggagtatgtttggttttggttttggttgttataagatgagaataattagtaaatttttttttattatttaattttgtgtggtaataaaatggatttttttttatgaatgtttggttggtttatttattattttttttttattagtaattttttgttttgtatttagttttttaattttttatttttttttgttttttagtgtatatagtgttttttatgttaggttgggtttgtttttattttgtaattataaaggttattaaagtaattattgttggttttgattggaaaagttggttattaattagtttttttttgtttttggtgtagtggattagttggtgttgggattgagttaatggaaatgtgggttaaatgagaaaagatgtttggatttttttgtttggatgtgtggtttggaggaggattgtgaggttttttagtggtgggaggtggtggagttgttgtggagagggagggaggttttggagagggagggaaggaaagggggagggagagggaaaggggggagagggagaggaggtgtggggtgggggaggggagtgagtagggagttgggagagggaggaggggtgggaattaggggagtggtttgaattttgtttggtttggattttgtagttattgttgggttttgttgttgggttgttttttgtgtggagatttggtttgtgttttttttttggtttttttttttttttttttttttgtttttttttttttggtttatatagttttttttagaaagaagttattttagagttgtgtgatttagttttagagtttgttggggtttgtttattgggttttttgtgtgtttttttttgtttttttttgggtatagtttgtttatgaaatttaaggtgttggttatgtgttattttttttgggttggggtttttttggtttttgtgtgggtgttggtttttttgggtgggtggtagttttgttttgtgtttttttgggttggtgtgagggattttagagtgtgtggggggttttaggtggggaggagtggttgtgattttggatgtgagaggtgtgtgggtttaagtggtgttgggataggggttgggttttttgtttattttagggtttatgtttgtttgtggggttgtgttttttggagttatatttgggtgggagggttttttttgggggtttggtttgtgttttttgttgttttttgttttttgttttttgttttttgtgggttttgtttggttttggttgatggaataagaataataaaggaagtggtgtgattggtggagggggtgtttgttgtttttttattttttattttggttgggttgatggtttttgtgtgtttttatttgttttagtgtggaggtgattttggttttgttgttttggtgttgggaggatattgtgtgtttatgtggatgattgtgtttgggaatagggattttttgaatttttttgttttgtgttgtgaggtttatatgtgtgtggtgattattttggttttgagggggtggtggggttatggtgtgtggtggatttggtagtggtatttaggttgtgtgtgtgggtgtgtggggttttgaggtgtagggtgattgttggttttggttttttgaggaaggggtataggtgttgtttgtggttatttgggttaggtgagggtaggggatgtgtgggggttggaggaggaggtttggtttgtgggtggtaggagggatttggggttagttgaggttgtttttagggaggtagatatttgttgttgttgggatttttgatatgttttgtatgtgtgggagtggaattgggtttgttttggaggttttttttggtgtgtttggatttatttaaaggttaaagaaaaatgttaaggagagtgattgtttggagagtttttggttttttttttgggtttttgttgggttttaggagtttttggaggggaagtaaggagttttagtgttttggagttttgtttttattaattttgtttggttttttgttgtttaggtttgtgttgttttagtagaggaggggtgggagttgttttaggtttatttttttgtgttggtttataaggaggttttttttgtaatttgggagaggttgggggaggtttggagggtgattgtgtggggttgtgggatttggatagttggggagttgtgattgtgggtagtgttggggttgagggtgaggagggttttattgtagggaagggtgggatgttggatagagggattgattggggtttattggtttgatatagaagttgttggattttagggtttggttgggaaatttgttttttatttgtttgtgggtgttgtagaagaaattgaagaaagaggttttttttttatgtttaggatggttttaagtgttttatttagtgttgagtaggagggtgatgtggagggaaaaattgttggttgtaagttaggttttaggaattttggaagaaatgaagatttaaagaatttttttttaagtgattgagttttaataattttataatgatttgattttttttttgtggagttaaaaaaaatttttaaatttttgttagttatggtttttaagagaaagaaatgagtttaaaagtgagtttgaggtatagttttgatttaggtgtggttttggtggtttttagtgttattttttttatgggtattgattttttaaggttgtattatggtgggtggattttaaagagagtttagattaattagaggtattttattagttttgatttgaaattgaaagaaaattatgtttaaatatttatgattttgatatttatagttaggtgtttttgaaaagtggaatatttttttttgtatagtggtagtttaatgattgaaagtttggaatagagaagaagtgaggaggaggaggagggagaaggaggtttggtaatatagtggtaggggtgtgttttgggtgggggagatgtatagataggtatattttagtgttgagtttttagaggtaggaatagtataatttaaaaaaataattaggaatgattaagttaattttattttaggttagatttattttgagaataagatgaagtataatattgtatattttttttttttaattgtttgtatttgtaattttttaaatttagaatagatagtattgtaaaagttgtgatttaaaataagtgtatgattatagagataatttgtggagttgttttagaatttagtatttgtagatattgttttgattaatttaaattattttgattgtgtttttgagtggaggtgtatgaggtttttattttatgtttttgtgagttatttatgggaaaatgtttttagaatttttttagttgtttatgtggtaagtttaaaagaaaagaaaaaaggatatgttatgtttaaatttaattgtgagagttgatatagttatataaatataaaattttatggtaaatatgtgttgatgggtagttagatttagtttttttttaaggttgtgtgatataattagttaataggagtagtttattttttgagttatgatgtgtagtattaaaatatgtttgtattataaagatgtagggatataggtgtttggtgttagttaatgttaaatttttaatattgttgatgtttttatttgtattatttttaaggaattagattttagttttagttttattttatttttgtgtgtatttaaattattaaattataaatattttttttttttaaaatttagaagttagttttagagattattaatgagttgttgtaataagtttatttttggtttgttggatgaatttttttagaattattaggaaattttattttaaatttattaaaaggtattattaaaatataatatttattttagggttgatgaatattttaagtttttaggttatagtaagtgatttaatttgaaaatatgggggaaggggtgttttaaaatattttaaaagtattttttaaagttgttaatggaattatttttaatttggaatttgttatagaattttaataaatgagagaagttaggtggaaataattatgtattaattttttgtattataaaatttttttagaagttattattagagtaagaggtattgtggtttgaatttagggtgggagaagttttttgtgtaattgaaagttattgtttttttgtgtagatgaaattgtatttgtaaatttgttatttaagtggttaaaaaatttaaaaaagtaaaagaaaagaatttttaaggaaaaattatttttaaatgtaaattttaatgaaaataagttgggatatattgttttaaaatgggttatttgttgagtttttttaggtatatatttaaaagtgaatatataagaaaggtaataaattgtttatttgttatttttaagtatttttaaaatattagttttaaagaaatattgtgttttaagatattagggaagatttatgatattgatgtttaaagggggaagtatttttgtgtaaattaattttaattagtagattgtttttggtgggagagagggatttagaggttgagtaggggaaggatgtttttgagaaagttgtttttagttttttttagattttttgttggtgtttttatgatatttaaatttagatttagtggattatatttaaggtattggtttttgatttttatttttggtttgtttgtttggtttttaggtttgtttggatgtatgtgtgttttttatattaggtgttttttgggatggggtttggtttttttattttgtaagaattagattttttttaggattgggggggttattgttttgttttttttatttggatttagaagttttaatttaagatttgtttagtgttgtttgttagaatttttttgtggtatgattttgagtagagggtgagggaaaggagggttagtgtttggttttgttttttgtttgggtttttttttttgtttttttgtttttttttttttgttggtttattgtatttttataggagttataaagattaggttttagtgttggatataaaggttaagggtttttgggagttgtgggtatttagagttaggagaggggttttggtgtggagggtgttgtggtttagttttttggttatagagtgtgttggttgtgagggaggattaaggtttttaattatgtttgtgtttatttgtgaattttggtgtttgtagtttttgggtggtgtagttgttattgttgttgttttttttggagtgtagaggggtgtgtttgggagggggtgggagggtatttttttttgtgttggtgaaaggaagagtttttagtttttttttttgtataaatttttatttttttttttgtttgattgtgttttaaaatttgggattggtgatgtaaggatagtttggtttggtgaagattttttggatattttgtgttttggattttaggtgggtggttttatggtgttggttgggatgtgtagtttggggggtgggattatgtttgggattttggggttgttgtttgaggatggaggttggtgatttgaattgtgttgtttttagggttgtggtggggttttttttttagttgtttagtttgtagtgtttagtttagtgtattgaggattaaaaagggtgggagattttttttggttttaaaaggtaattgtgttgagattttaattttaatttgggggtttgtttgattttttggagtaatgtttttttaaaattatggagtaggttagtgtttggaattgtataggtagttatgaaggaaggaaatgaagttttttgttttaatagttttgggtttagttataagtttttttttggtgagtatgtggttgttttatttggggtgggggaggtgttgagaaagtgtagttttttttgggggaggagagatggttttttagaggtgtttttatttgtttttggaatgtttttttttgtaggtttttttggttttttgtaatttgttgtttgttgggatatttttatggtttggaggtgtgtttttggattttggtgaggagggtgaagagtgttttaaaatgggttgagaggaaaatgtgtttatattggtgtttttttattttggttgtttgtttttttttttttttttttttatatgttttttatttttgtgtttgtatttttttatttttagtattttgtaatggttggaattgtagggagtggggagtaatgtgaaaggttgagagaagagtgttggggagaagttttggaggttttagattttttggggtggtttttgtggggtgttgggttaggatagttgttaattttttaaatttgtgtgtttagaaggagttgttttttgtttgtttttttttataggtttattttagatttatttggggatgattttaggtgtagtttttttttgttggtttaagtttttgataggagttttgtggtgaggtagagattttttgaattgagttttttgatgttttagttgtttgttagagtttttatgtgtgttttttagtttttgaaagtttttttttttgttttattatttatgtgtttggtgatgtttttgtgggttttttttgttttttttgtttttattttagttttttttgttttttttagggtttatttaattgtattatgagtgtttgtgttttgtttggtatttttggttatttgtagttgggttggtgtttagtgtttgtgtgggaggaggtgggggtgtgtgttgggttgagtggttttggggtgtagtagttgtgggtagtggtagtgttattattatagttagttgtttttttgtgttggagttatagattagtggggttatttgtttttgattataaatttttagggtggttggaggagataaaggtgttgtgtgttgttgttttagtagtagtggttgtgtggtggtatgggtttggagtttgtaggtgttggagttttgtgtggttgtttggtttagttttgtgtgttttgttttggtttggtttttgggttaggtatgttgggttggggtgtggtgtgggtgggtttagggtgggttttggatggttttggtagggttgttggttgtgtgtgtagtattaattagtgtggttgttgtgttttgttttatatttggtttggtgtgtatttggttggtggtggtgtggtttgtggtttagttattggttgttatagtgatgtttttttttttttttatatgttgttgatagtaattggttaaggggttgtggttttttaaatatttttttttgtttgagattatgaatggatattagttttgttagttattggtataatgttgaagttagggtttttgttttttttttttttttagtgttttttttttttattgtttatattgggtaagtttagggtagtattgaggggagagagattttggttagaaaagttaaggtgtgtggttttgttgtgatttttgttttgggaggggtgggtggggtgtgttgttatttttggtaagagaaaattgtatggtatattgttttttttagttattttttttagtgttgttgtttgggtttttttgttttttttttaaatggaagtaggttaatgatttagggtgagtagatgagagtttttttgtttattttattagggtttttttgagtgtttaggttttgatgtgtgtagaaagtgttttgtgagatgtggaattggtgagattttgttattatttggtttaggttaatgttggttgttagtttaaaatgttgaagggagatggtggtgaaaatttaggtgtgtgagttgtgtttttgtttttttttttatttaggttaatggtttggtttagattattgttttgtgggtgaaaggagtggagtagaattataggttatgtttttagttgtttgagtttgtttatataatttttggtttttggtgtagttaggtttgtagtgggtgagaagagttagggttttggggtgattaggattattgagtattttttttttgtgttttttgtttatgttttttttttttaggttttggattttgggttatagttataggttggggtattttggtgtgtggtgtttttgtggagttggtgagagttggagagttgaaatttaatatttgtgtgtataatgtgttttttgaggtttatagttgtaggaataaggagaagaaaggaagaggggggtgtagattttgttatatgtagatgatagtttgtggagggttttttagtttttttttttttggaaattttagtggtttttttttaggttttttttttttattgtttggttattgttttttgtgtttgggatagttggagatggtggtttgtgttatttgatgttttttttgttgtatatttggttgtttgtggtgtttgtttttggtttttttggggttaatttttttatattttttatttttttaggttaggtttaggtggtgtttttatagttttttttttttttttttgtattttggtgttgtttttagatttgtttggtgtagagggttttgtttggtgttttttttttataaatttagttttgtaaaatttgggggtgagttttagggggtagggtttagaggtgggggttgtttatagatatgagtatggtgttgtttgttgtaggtttttgtttaaaagtggttgaaggattttgttttttttgattgtaggtttaggttgagttttgtatttatttttgtatttatagggtaaggttagagtgttttataaagttttagggtaaagaagtggttttgtattgggttatggtttttgtaggtttgagtgggttgtaggaggtttggtgtggtttggtgggggtgtgagaggtgagaaattgtggtgttattggtgttttttgtttatgagtgaatttttttagtaggtggggatggggtatattattttggtttttttgttttttttgtttagggtaaggtttgtaaaaatttttgtattttggtttgggggtggtgtggtggtgggtaggttagagagaagtggtatttgggtttttttagtgtttgggatgtttttttagggatttttttgggtaaagagttgagtggtagtggtttttgtttttttttgttatttttttttggtgttttggtgtttttagttaggttttagggtgattttaggtttggttttgggtagagatagaggaggggaggggaggtggtgttggggggtggggggttggagatggtgggaggaggatttgggagttggggtgggaagaggggaagatagtggagagaagggatggggaggggagggggtttggaggaggggatttgttgtttttagtttggttggtaattggtttttttatagtaatggttagtgtgtgtgtttgtgtgtgtgtgtgtgtttgatgtgtgtgtgtttgtggtgtttttgggattttttgtgggggttgggaggggattgtagaattttagggtggtgatagagtaaatttttttaggattggaggtttgatttttgtggtgttgggagtgttttagggtttggttgtgttgtgttggtgatggggtaggtttggggaatgtgtgtaggttttgggattggttgttggggtattggggtattttgtttttgttgttttgatttttttgttgtggttgtagggttttggggtattggggagtgggtgggtttttttagtgatttggagtataggggtgggtgatggtgtttttattatggttttgtttggtttgagtgtttggtgtatttgaggtttgggttggggagtagttggggaattgtgtgttgttttggggagtttttggttaggttggttttgggtagaggttagaggggttttggtgtattttttttgtttgtggtgattttgtattattttttttgttagtttgtggttttttttgttttggattgttggagttttatttaggttggggtttttagtaggtggttgggagttttttgaggtggttaggagtggttggtagttgttttttttggttaggttgtgtttagttttttagtttttatggtggtgtagattgtatgtggttattttgggttttggatagggttagggggatgtagattttgttgtttgggggttttggggtggttatggggttggtgattttagagtaaggtggagtttagtataggttagagagttggttttgttttttttatagatatgatttgatagtgaatatataaataaatataattttttttgttagtttttttttttgttgttttagtgttttatttttaatattaaagtattgtatttttgatttgattttaatttaatgatttgtttttttagtgttttgaggaaagatgggtgggaggtggtattaatttagtttaatttgggttattttaaaaattgtgagagggtttgaaaggttttatgtgggtttattagtagaatagtatatttttttgtttatgttttggtgtatttgtggtaatatattttgggtggtagatggttatttatgtttgagagtttttaatttattttttttttttttattattttttttttaaggtgtggtttgattttagtggggttgtagaattggttttgttaaagttgaaggtggatt

SEQ ID NO: 306 - DNA, 11000 bp, Artificial Sequence
  chemically treated genomic DNA (Homo sapiens)
ggtttgtttttagttttggtgaggttagttttgtagttttattgaggttaggttgtattttagaggaggggtggtgggaggaaggggagtgagttggaggtttttagatataaataattgtttgttatttagaatatattgttgtaggtgtattaaggtgtggatgaggaagtgtgttgttttgttggtgaatttgtatggaattttttaggtttttttatgatttttaaagtgatttaaattgaattgaattggtgttattttttatttatttttttttaaagtattagaaagataggttattaaattaagattaaattaggaatgtggtgttttgatgttggaagtgaaatattgagataatggaagaagggattaatgaaaagaattgtatttatttgtgtatttattgttaggttatgtttgtgaagaaagtaaaattagttttttggtttgtattaggttttgttttgttttggggttgttggttttgtggttgttttaggatttttagatggtagggtttgtgtttttttagttttgtttgaggtttagggtggttgtgtgtggtttgtgttgttgtggagattgaggggttggatatggtttggttgagggagatggttattggttatttttggttattttggagagtttttggttgtttgttggagattttagtttggatgaggttttggtgatttagggtgaggagagttgtgggttggtggggaaggtggtgtgaggttgttgtgggtggggagggtgtgttagggtttttttggtttttgtttggagttggtttggttgggagttttttgaggtgatgtgtggttttttagttgttttttggtttagattttaggtgtgttgggtgtttgggttgggtagggttatggtgggggtgttgttgtttgtttttgtgttttgggttgttgggaagatttgtttattttttggtgttttaaggttttgtgattgtagtgggagggttggggtagtgagggtaggatgttttaatgttttagtggttgattttggggtttgtgtgtgttttttgagtttattttgttgttagtgtggtgtagttagattttagggtgtttttagtattgtggaggttgggtttttagttttggaggggtttgttttgttgttattttagggttttgtgatttttttttagtttttgtggggagttttgggaatattatgggtatatatatattagatatgtgtgtatatatagatgtgtgtgttggttgttgttatggagaggttggttattagttaggttgagggtagtaggtttttttttttgagtttttttttttttttgttttttttttttgttgtttttttttttttttgttttggtttttgagttttttttttgttgtttttggttttttgttttttagtgttattttttttttttttttttgtttttgtttagggttgggtttggggttgttttggagtttggttggggatgttgaggtattggaggagggtggtggggagggataggaattgttattatttgattttttgtttgagaaggtttttgggagggtattttgggtgttgggggaatttgagtattgtttttttttgatttgtttgttgttgtgttgtttttgagttagggtgtgggggtttttgtgggttttgttttgggtaggggggatgagagggttaaggtgatgtattttgtttttgtttattggaggggtttatttatgggtagaggatgttagtgatgttgtagttttttgttttttgtgtttttgttgagttgtattgggttttttgtagtttgtttaggtttgtgggaattatggtttgatgtgaggttatttttttgttttggagttttatgaagtgttttggttttgttttataaatataaaaataaatgtggaatttagtttgggtttgtagttagaggaaatggggttttttggttatttttagataggggtttgtagtggatggtattgtatttatatttgtggataatttttgtttttgagttttgttttttggggtttgtttttaggttttatagaattaggtttgtgagagaaaagtgttaggtaaggttttttgtattgagtaggtttaggggtagtgttagagtgtaagggaggggaggggagattgtggaagtgttgtttgggtttggtttggggaggtggggggtgtggaggagttggttttggaggggttgggagtgggtgttgtgggtagttgggtgtgtggtgggaggggtgttgagtggtgtgggttgttgtttttagttgttttgggtgtagggaataatggttaggtggtgggagaggggggtttaggagggggttgttggggtttttagaaaaggagaaattaaagagttttttgtagattgttatttgtgtgtgataagatttgtgttttttttttttttttttttttttgtttttgtagttgtgggttttggagagtgtattgtatatatagatgttgggttttagttttttggtttttgttagttttgtgggggtgttgtgtattggggtgttttaatttgtggttgtggtttggggtttagggtttggggagagagagtatgggtgggaggtgtgggggggaggtgtttagtggttttagttgttttgagattttagttttttttgtttgttgtgggtttgattgtgttaggggttgggggttatgtgggtaggtttgaatgattgggagtgtggtttgtgattttgttttattttttttgtttgtagagtggtggtttaggttagattattgatttgggtagggggaagggtaaggatgtagtttgtatgtttgggtttttattgttgtttttttttggtgttttgggttggtggttgatattggtttggattaaatggtggtaaagttttattagttttgtgttttgtaagatattttttatgtgtattgggatttaaatatttgggaggattttggtaaagtgagtagaggggtttttgtttatttgttttgaattattggtttgtttttatttggaaagggagtaaaaaggtttgaatggtaatattggaaaaggtaattgggaagaatgatatgttgtgtaatttttttttgttaagagtggtgatgtattttatttattttttttaggataaaggttatagtagagttgtgtgttttgatttttttggttgaggtttttttttttttggtgttattttgaatttgtttagtatgaatgatgaaagggagaaatattgaaaagaaagaaaaggtgaaggttttggttttggtgttgtattaatgattgataaagttgatgtttatttatagttttgggtgggagagggtgtttggagagttgtggttttttagttaattgttgttagtaatatgtggggggggggggggatattgttatagtaattggtggttgggttgtgagttgtgttgttgttggttgggtgtgtgttgggttggatataaggtggggtgtggtggttgtgttggttggtgttatgtgtgtggttggtggttttattgggattgtttggagtttgttttgagtttgtttgtgttgtgttttggtttagtgtgtttagtttgggggttgggttggggtggagtatgtggagttgggttgagtggttgtgtagagttttggtgtttgtgggttttgagtttgtgttgttgtgtagttgttgttgttggagtagtgatgtgtggtatttttgttttttttggttgttttagaagtttgtggttagaagtggatgattttgttagtttgtggttttagtgtagggaagtagttggttgtgatgatggtgttgttgttatttgtagttgttgtgttttgaggttgtttggtttggtgtatgtttttatttttttttgtgtgggtgttgggtgttggtttagttgtaggtaattaggggtgttgggtggggtgtgggtgtttgtagtgtggttgggtgggttttggaagaggtgagagaggttgggatgggggtggagggagtaggaagggtttatgagagtattattaggtgtgtaggtggtggggtgaggaagagagtttttgaaggttggagggtgtgtatgggggttttaatgggtaattagggtgttggagagtttagtttagggggtttttgttttgttgtaggatttttgttaaaggtttgggttggtaggggagagttgtgtttgggattatttttaagtgggtttagggtgggtttgtgaggaggagtgggtaaagggtagttttttttgagtgtatagatttggagggttggtagttgttttggtttagtgttttgtagagattgttttaaggagtttaggatttttgggatttttttttagtgttttttttttggttttttgtgttgttttttattttttgtagttttgattattgtagggtgttgggggtgggggggtgtaggtatggagatgggaggtgtgtgggaaaggaggagggaaggggtgagtagttaggatggagaggtgttagtgtgggtgtattttttttttagtttattttggggtgttttttattttttttattagggtttgggagtgtgtttttgagttatgggagtattttagtgggtggtgaattgtagggaattgagggggtttgtagggagaggtgttttagaggtaggtggggatgtttttgagaggttatttttttttttttaaagagaattgtgtttttttagtgttttttttattttaggtgaggtggttgtgtgtttgttagagagaaatttgtgattggatttgaagttgttggaatgagggattttattttttttttttgtaattatttgtgtagttttgaatattggtttgttttgtggttttagagaagtgttgttttagggaattgggtgaatttttaagttagagttaaaattttagtataattgttttttagggttggagagagttttttgttttttttggtttttagtgtgttgagttgggtgttgtgggttggatggttgggagaggggttttgttatagttttgaggatgatgtggtttaagttattgatttttgtttttggatagtggttttggggttttggatgtggttttgttttttgagttgtgtgttttggttggtattgtggagttatttgtttggagtttggagtgtagggtgtttgaggggtttttgttaaattaggttgtttttgtgttgttgattttagattttaggatgtgattgaataagagaggaagtgaaggtttgtgtggaggagggagttggaagtttttttttttattgatatagaggaaagtgtttttttgtttttttttaagtatatttttttgtgttttagagaagatggtggtggtggtggttgtgttgtttgggggttgtgagtgttgggatttatgggtggatgtgggtgtggttggggattttggtttttttttgtggttggtgtgttttgtggttaggaggttgggttgtagtattttttgtgttgggattttttttttggttttgaatatttgtggtttttgggaatttttggtttttgtgtttggtgttggggtttgatttttatgatttttgtggggatgtggtgaattggtgaggggggagggatggggaagtgggggagaaagtttaggtaggggatggggttgaatgttgattttttttttttttgttttttgtttaaagttgtgttatagaggggttttgataagtgatgttaggtgggttttgggttggggtttttgagtttgggtagaggaggtgaagtggtaatttttttagttttgaagagggtttggtttttgtggggtggggaggttaggttttgttttgagaagtatttggtgtggaaggtgtgtgtgtgtttaggtaggtttggggattaggtgggtgggttaaaaataggggttaggagttggtgttttaagtgtgatttgttgagtttgagtttgggtgttatgaaaatgttagtggagagtttgaaagaggttgggggtggtttttttaggggtattttttttttgtttagtttttgggttttttttttttattggaggtaatttgttggttagaattagtttgtataagggtgtttttttttttggatattagtattataaattttttttgatgttttaaaatatagtatttttttaaaattgatgttttaggagtgtttaaagatggtaaatagataatttattgttttttttgtatatttatttttaagtgtatgtttggaaaaatttaataaatagtttattttaaaatagtatattttaatttatttttattaaagtttatatttaagaataatttttttttgaagattttttttttttgtttttttgggttttttggttatttgaatggtagatttgtaagtataattttatttgtatggaggaataatagtttttagttgtataaagggttttttttattttgaatttagattgtagtgttttttgttttgataatagtttttgaaaagattttgtaatgtagagaattaatatatgattatttttgtttgattttttttatttattagaattttgtggtaaattttaaattaaaagtagttttgttaatagttttaaaaaatatttttaaaatattttaagatatttttttttttgtgtttttaagttggattatttgttatggtttgaaaatttaaaatgtttattagttttaaagtgagtattatattttagtaatgttttttagtaaatttagaatgaaattttttaataattttaagaggatttatttagtaaattaaagataaatttgttatagtaatttattaatggtttttaaaattgatttttaagttttaagagaaaaaggtatttataatttagtaatttaaatgtatataaagataggatgaggttgggattgaaatttgattttttagaaatgatataaatgaaagtattaataatgttagaagtttaatattaattggtattgagtatttgtatttttatgtttttatgatgtaagtatattttaatattgtatattgtgatttagagaatgaattgtttttgttaattggttatattatataattttggaaaaggattaaatttggttatttgttaatatatatttattataaagttttgtatttgtgtggttgtattagtttttataattgagtttgggtataatatgtttttttttttttttttttaagtttattatatggatagttaaaaaagttttgaaggtatttttttgtaaatggtttataagggtatggggtggaagttttatgtatttttatttaggggtatggttaaaataatttaaattggttaggatagtgtttgtagatgttaagttttaagatagttttataaattgtttttgtggttatatatttattttgaattataatttttgtaatattgtttattttaaatttgaggagttgtaggtgtagatggttgagaggaagaaatatgtgatattgtattttattttatttttaagatagatttaatttgggataaaattaatttaattatttttgattatttttttaaattatattatttttgtttttgagaatttagtattgaagtgtgtttatttgtgtattttttttatttgggatgtatttttgttgttgtgttattaggttttttttttttttttttttttttttattttttttttgttttaaatttttagttattgagttgttgttgtatagaagggggtgttttgttttttaaaaatgtttgattgtaaatgttaaagttataaatatttaaatataatttttttttaattttaagttaagattgataagatgtttttaattagtttgggttttttttggggtttatttgttgtggtgtagttttggggggttggtgtttatgggggagatggtgttgaggattattaaagttatatttgggttaagattgtgttttaaatttatttttaaatttattttttttttttaaaggttatggttagtaggagtttgaagattttttttaattttataaaaagggagttaagttattgtaaagttattggaatttaattatttagaaaaaaattttttaaatttttgttttttttgggatttttaagatttgatttgtagttaatagtttttttttttgtattatttttttgtttagtgttgggtgggatatttgaaattgttttgggtgtggagggaagatttttttttttggttttttttgtggtgtttgtgggtgggtaggaagtgggttttttagttgggttttgggatttagtgatttttgtgttaggttggtggattttagttggtttttttgtttagtgttttgtttttttttgtagtaagattttttttgtttttagttttggtgttgtttgtggttatgattttttggttgtttaggttttgtggttttgtgtggttgttttttgggttttttttggttttttttaggttgtaggaggggtttttttgtggattggtgtggggaggtgggtttggggtggtttttattttttttttgttgggatagtgtgggtttaggtagtagggagttgggtgaggttggtggagataggattttagggtattggggttttttgttttttttttggggatttttgggatttagtggggatttgggaggagagttaggagttttttaggtaattgttttttttgatatttttttttgatttttgagtaaatttaagtgtgttaagggaggtttttaaagtaggtttggttttgtttttgtgtgtgtggagtgtgttgagggttttggtgatagtaggtgtttgtttttttgggaatagttttggttggttttgggttttttttgttgtttgtagattaggtttttttttttggtttttgtgtgttttttgtttttatttggtttgagtgattgtgggtagtgtttgtgttttttttttggggagttggagttggtggttgttttgtgttttggaattttatatatttgtgtgtatagtttgggtgttattgttgggtttgttatatgttgtggttttgttgtttttttagaattagggtggttattgtgtgtgtgtgggttttatggtgtggggtaggaaggtttgggaagtttttgtttttgggtgtagttatttatgtgagtgtgtggtgtttttttgatgttggggtagtggggttggggttgtttttgtgttggggtggatggaggtgtgtgggggttattggtttggttgggatgaggggtgggagggtggtgggtgttttttttgttggttgtgttgttttttttgttgtttttgttttgttggttaaggttaggtgggatttgtgggaggtgagaggtgaggggtgaggggtggtgaggggtgtaggttgggtttttgggaaaagtttttttgtttaggtatggttttgggggatgtggttttgtaggtgaatatggattttggggtgggtagaggatttggtttttgttttggtgttgtttggatttatatgttttttgtatttggggttgtggttgtttttttttgtttggggttttttgtgtgttttagggttttttgtgttggtttaggagggtatagggtggggttgttgtttatttgggagaattagtgtttgtgtggggattgaggagattttggtttgggggaggtggtgtgtggttggtgttttaggttttgtgaatgggttgtgtttggggaggggtggggaggggtgtgtaggagatttggtgggtggattttggtggattttggggttgggttgtgtggttttagagtgatttttttttggaagaggttgtgtgggttggagggaggggggtggaggggaggggaggggaggagattggggagggggtgtggattggatttttatgtgaagggtgatttggtggtgagatttagtggtggttgtggggtttggattaaatggggtttgggttgtttttttggtttttgtttttttttttttttttggttttttgtttattttttttttttattttgtgtttttttttttttttttttttttttttttttttttttttttttttttttttttttttaaagtttttttttttttttgtggtggttttattgttttttgttgttggagaattttgtggtttttttttgagttgtgtatttaggtaggaaaatttgggtgtttttttttatttaatttgtgtttttattaatttagttttggtattagttaatttgttgtattgaaggtaaaaggaggttaattaatgattagtttttttagttaagattggtgataattgttttggtggtttttatgattataagataaaaatgggtttggtttgatataagaggtattgtgtatgttgggagatgggaggaaatgaagagttgggaggttgaatatggagtagaaaattattaatagaagagagataatgaataggttggttaggtatttatggggaaaaatttattttgttattatgtgaaattaggtggtggaaaggggtttgttaattgtttttattttgtagtagttaggattaaggttgggtgtgtttttttatttattttttgagttattgtgtagggtgtgtggtttgtggggtggtttttttatttttttgtggtgtttttaattgttgttaatatattttttaatgaagttaatgaggggagagttgtgtaattatttgtatgtggagataagtgaaatgtattgaaagggtttttttatatttttattagttttatttttgttttttaagaagtagtgagaatttgaagggttttttttgttgagaagtgaagttttaaaggttttgtagttttttttaaggaaaaatatgtaggtgtataggtggtaagtgttgtggtttgtattaggttatttttggagagtgattggagttaggtgggatttgattagtgtttgtttttt

SEQ ID NO: 307 - DNA, 1743 bp, Artificial Sequence
  chemically treated genomic DNA (Homo sapiens)
ttgttttttaaattttgttgtaattgtgaatgtttgtgatgttattatatttttagtataagagaattggagtatttttggttttttttataattgaagggtttttagtgtagggtgtagggggagaggtttgaagttttggagatagtgtttgagggatggaggttgtgtttggttgtgtttaggtttgggtggttttgggagttgagattttgtaggatgtagtgggggggggttagggtttgattttttatttttgtgagttagggttgtttatgtttttattgttttttataggtaatgtttagttttttttttttttattttttgaaatattttggttttgttttgttttgtttgttgtttgtgattttgattttgatttgtttgtgatggtgttttttttaggaggtagtggaggattagggttaggttgtttattttggtggtggtggtggtttttggttaaggtggattttggggaggatagtagttgggttgtggtttgtttttagggggagtgggtgtagggttgtgagtgggtagtgtttttgttttgtatgaataaagtggttaggtgtgttgggttgaggtagtattgtttttttgggagtgtggggggtggggaggatggtgggggtatttatttgagggttggtggagggtgtgggtgggataggtttaggagatgggattgtggtgggttggggttttgtgttgagggtgtatgggttatggggaaggggtgattggtgtgatgtttgtggtggggtttgggagttttgtgttgtgggttgggggttggggtttgagtttgattttgtggttgtgaggtatgggaattggtttgttgggttaggtagtggtgttaggtagtaggggtagtgatgttgttgtttttttttttttttgtttttgtttttgttttgttgtgtttttgtttttgttgggtttttgttgttgttgttttagttttggtgttttttgggttttttttttttattaaggttgggttgatttgtagggattattttggaaagtgaggggttgttgttgttttttgtagttgttggtggttatttttaattttttttttttttttgttttttttattttttgttggttgtttgattgattgattggatttttttttttttttttttgttttttttattgagttggttgtagaaattgtagttgtttagtttttatttttttttgttttttttttttttttttttatttttttttttttttttggttttttgtttttgttttatttttagtggttgtttttgtttttgtttgtagatagtgttgttggatgtttttagttggattttaattttattttttttagtttttttttttattgttttttagatgtgttttttttttgttttgtgtttttttttttttttttatttttgtttttttttgtggtgtttattttttttagttttagtttttgaaaggatttagttgagaaaggataattgggttttgttttttttaattttatattttttagttggatgttgttagaggtgatggagaaatgtaaaggtgtgttaattttattttagttagagtataaaagaattgtttatgttagttattgtattatgtagttttgaaatttttgtatgtttttttgtgtggtttttgtttgtgatgggattgtagttgaggagtttggttttaaatggtgttttttgttagtgattttgagttggttgttta

SEQ ID NO: 308 - DNA, 1743 bp, Artificial Sequence
  chemically treated genomic DNA (Homo sapiens)
taggtaattgatttaaggttattgatggaaggtattatttgagattgagttttttaattatagttttattatggatgggagttatataggagagtgtgtaggagttttgaagttgtgtagtataatagttggtgtgggtagtttttttatattttggttagagtaaaattaatgtatttttgtgtttttttattgtttttgatagtatttagttaaagggtgtagggttaaggaaagtggaatttagttgtttttttttagttgagtttttttagaaattgggattgaggagggtgagtgttgtggagaggggtaggggtgggagaggagagaggggtgtggggtggggaagaggtgtgtttggaaggtagtggggagagggattgagaggagtggggttgaagtttagttgggagtatttagtggtgttgtttgtagataggggtgaaggtagttgttgagagtgaggtaagagtgggaagttgagggaagggaaggaagtaaggaaagaggaaggaaaggtaggagggggtagaagttgagtggttgtaatttttgtggttggtttagtaggaggagtaggaggggaaagaggaggatttagttagttagttagatagttagtgggaggtggagaaagtaggaggaggaggaggattaaagatggttattaatagttgtgggaaatggtaataattttttattttttgggatggtttttgtgggttggtttggttttgatggagagaagaaatttgaggagtgttgaggttgaggtggtggtggtggggatttagtgaggatgaggatgtggtggagtagggatgggggtaggagaagggaaaggtggtggtgttgttgtttttgttgtttagtattgttgtttggtttggtggattggtttttatattttgtggttgtagaattgagtttgggttttggtttttggtttgtggtgtggggtttttgggttttgttgtggatgttgtgttggttgttttttttttgtagtttgtgtgtttttggtgtggagttttggtttgttgtggttttgttttttgggtttgttttgtttgtgttttttgttggtttttaggtgagtatttttgttattttttttgttttttgtgtttttggagaggtggtgttgttttggtttggtgtgtttggttgttttgtttgtgtggggtggaggtgttgtttatttgtggttttgtgtttgttttttttagggataggttgtggtttagttgttgttttttttagggtttgttttggttgggagttgttgttgttgttagggtgggtggtttggttttagttttttgttgttttttggggagggtgttgttgtggatgggttggggttggggttatgggtggtgagtggagtggagtggaattgggatattttgggggataggggaggagagggttggatgttatttgtgggaagtagtgggggtgtaggtggttttggtttgtaggggtaggggattaggttttggtttttttttgttgtattttgtggggttttagtttttggagttatttggatttgagtgtagttgagtgtggtttttattttttgggtgttgtttttagggttttgggtttttttttttatgttttatgttggaagttttttgattatggaaggagttagagatgttttagtttttttgtattggggatgtggtggtattgtaaatatttatagttatggtgggatttaagaagtag

SEQ ID NO: 309 - DNA, 10196 bp, Artificial Sequence
  chemically treated genomic DNA (Homo sapiens)
aagtgtatgtttattgaggaggtagttatagttataattatattgttatagttggtgtatatttgtattgggttatagttatgattatatattaattatagttatatatatagatagaaatatgtagttatttgtaggtatttttatttgaattttgttgtatatagttatatagtatatagttgtatattattatggggataaatgtagtaatatttaattaggtataagttttttatagttgtatatataatgttgtatgtggttttgtttttttttatatatatattagtagttatagtttttgaggttgtgttgtatatggtgtgagtgttggaaatatatttattataagggtagtttgttataattgtgtgattatttattatatatttttatatagatgtaagtgtatgtttttaattttatttttattgttgtataaagttgaggtttggtttttggttttgtttttttttgggttttttattttaggttttattagtttttgaagtagtagaattttttttggtattggggtagttgttggtaaagttttgagggttttgttagtgtgtgagttggaagttgaattattgtgagaagtatagttttgttgaggagatttttgggaagtgtagttagagatgtattaaggttggataagatggtttttgattgttagaatttttgtttgtgttttgtgttagttttgttgaaaggattgttttttttagttaaattgtttgtgttttagaggttttatggagttttgttttaggtttgggttttggtttttaaagaaagttattttgatgtgtttgagatgggtttagtttttggatttgttttattgtttttaggtgttggatagttttagaaagaggataagtttgtatggaaagataattgtataattgagttttttgggagatgtagtttggagttgggaaggtggttggattttttgaaagttattttaattgtttttatagataagttggtgttgggttgttggtttgagtattgtgtgtttagagtgtgtaggtgtaaatattttgggttgttgttttggtttttttgtttgggtgtgaattttgtttattgttttttagtgtagaggggttatgggattagaggttgtgagatttagaagtggttggggatgtagaaggggtgtagattaggaatttgtgatttgatggggggaggttgaagggaaaggaattgttaaatgtgggataggtttggagaggtagaaagagaggagtttgaaattgtaaagggtaggtgttattttgatttttgtgtgttttgtgataaatgagtggggtaggaagtaagaggagttttattttttttttttgtaattatttgtgtatttggattaagtgtattttatggttagtatttgattgtttttgatttataaaggtattgtatatatagttatgtatagtttaataataaggatatatgttttttttatggtttttttttttttttttttttatggtttttttttgatgttgagttaaagttggattgtattgttgtttttttggtttattgtaatttttttgtttgatttttttgttttagtttgttgagtgtttgtgattgtaggtgtgtgttgttatgtttgattggtttttgtatttttttggtttttattaaatatagggttttgttgtgttggttgggttggtttttagtttttaattgtgagtggtttgttagttttggttttttgaggtgttgggattgtagatggagttttgtttatttagtgtttaatggtgtttaggttggagtgtagtggtgtgattttggtttgttataatttttttttagttgtttgttttggttttttaaagagttgagattgtagtttttgttttgttgttattttatttgggaagtgaggagtttttttgtttggttgtttattgtttgggatgtgaggagtttttttgtttggttgtttagtttggaaagtgaggagtgtttttgttaggttgtttattgtttgggatgtggggagtgtttttgttttgttgttttgtttgggatgtgaggaatgtttttgtttggttgtgattttgtttgggaggtgaggagtgtttttgtttggttgttttgtttgagaagtgagattttttgtttggtaattgttttgtttgagaagtgaggagtttttttgtttggtagttgttttgtttgagaagtgaggagtttttttgtttggtagttattttgtttgggaagtgaggagtgtttttgtttggtagttattttatttgggagggaggtgggggttatttttgttaggttagttgttttgtttgggagggaggtgggggggttagttttttgtttggttagttgttttgtttgggagggaggtgggggggttagttttttgtttggttagttgttttgtttgggaggtgaggggtgtttttgtttggttatttttattgggaattgaggagtttttttgtttggttagttgttttgtttgggagggaggtgggggggggttagttttttgtttggttagtttttttgtttgggaggtgaggggtgtttttgtttggttgtttttattgggaagtgaggagtttttttgtttggttatgattttatttgggaggtgtatttaatagtttattgagaatgggttatgatgataatggtggtgttgtggaatagaaaggtgggaaaggtggggaaaagattgagaaattggatggttgttgtgtttgtgtagaaagatgtagatatgggagtttttttattttgttttgtattaagaaaaatttttttgttttgggattttgttgatttgtgattttatttttaattttgtgttttttgaaatatgtgttgtgtttatttagggttaaatggattaagggtggtgtaagatgtgttttgttaaatagatgtttgaaggtagtatgtttgttaagagttattattattttttaattttaagtatttagggatataaatattgttgaaggttgtagggttttttgtttaggaaaattagagatttttgtttatttgtttatttgttgatattttttttattattgttttatgattttgttaaatttttttttgtaagaaatatttaagaatgattaattaaaaaaaaataaataaataaataataaggatatattttggttgggtgtggtggtttatgtttgaaattttagtattttgggaggttgaggggtttgagattagtttgggtaatatggtgtaaattttgtttatattaaaaatgtaaaaattagttgggtatggtggtgtgtgtttgtagttttagttatttgggaggttgaggtaggagaattgtttgaatttaggaggtagaggttgtagtgagttaagattgtattattgtattttagtttgggtgatagagtgagatttggttttaaaaaaaaaaaggatatattttgagaaatgtattgttgggtaattttattattatggagtgtattgatataaatttagatggtatagttgattgaatatttaggttatatggtataatttgttgtttttaaattataaagttatatagtatgttattgtattgaatatagttggaatattgtagggattagttttataaggtttgtgggtttttttttttgtgtgtagagattagaggtggtagaaataaagatataagataaagagataaaagatatttgggtttgggtgagttattattattaagatatagagattgatagtggttttgaatgttaggttgtattgttatttattggatataagataaggggggtagggtaaggagtgtgagttatttttaatgataggtaaggttatgtgggttatgtgtttattggatagggggtttttttttgtttggtagttgaagtggagagagagagaagatagtttatgtattatttttgtatattagagatttttagtatttttattaattttgttattgttatttagaaggtagggttaggtgtataggatggaatatgaaagtggattagtagtgtgattattgaagtatagtattataggaagatggttagatttttagataattgtgggtgggtttgatttatgttaggttttttataagatatggtggagtagagttttttttaaatttttttggggaaagggagattttttttgttggtttgttaagtagtgggtgtttttttttggtattgatgttattgttagattataatttgtttggtaataggtgtttttttagatgttaatgttttgttagattaaggagttttttggtggttttgtttgggtataatagaggtttatatatttgttttttggttattttttattatgtttttttagtttatatttttgtatggtttggttttttttaggttatgattgtagagtgaagattattataatatttgaataaagagtaattattataaattaatgattagtgatatttgtgtataattatatttgtgatttgtatttagtgtaatttttgttattttatatattttattatattgaaatagtttatgtttttggttttttgttttggtatttgggtggtttgttgtttatagaatataatggtaagtatttatgtatttaaatatatttaaatatataaaaggtatagtaaaaaaaatagtatgaaaagtaaaaaatggtatatttgtatagggtatttattaagaatggaggttgtaggattggaagttgttttggagagttgatgagaggtgagtgaatgtgaaggttaggatattatagtataatattttagattttataaatattgtatatttaagtaatattatatgtatttaaagttttttttttataataaattaatttttgtttgttgtaatttttttattttataaatgtttaaatttttaaaagttttttgatttttttgtaatattgtttagtttaaaatataaatatattgtatagtttatgtgggatttgtattttttggtaaggaaatgttgtaggttagatgttatttttatgtggttatatagaggtagaaagattgtatatatgatattgttttttttaattatgggtttgtattttaatatattgtaataatgtttaatatttatggggttatagaaaataggatttattatggttggagaatttttagagttaatttaagtttaggaatgttggtaatgagaatgattagtaggaattagtgtaatgatttatatagttgaaattattaattgggttaggttggtggtttatgtttataattttagtattttgtgaggttgaggtgggttgattatttgaggttaggagtttgagattagtttgggtaatatggtgaaattttgtttttattaaaaatataaaaattagttaggtatggtggtatatatttgtgatattagttatttgggaggttaaggtaggagaattgtttgaatttgggaggtagaggttgtagttagttaagattatgttattgtatttaagtttgggtgatagagtaaagattttattttaaaaaaaaagttaaaatagaataaaatatatagttattatttttttgtttggggtaattttaaagttttttttttgttataaaaataggaatgtattatgtaaaggtttgaaataggttattttttttttttttttttttgagttggagttttgtttttgttgtttaggtaggttggagtgtaatggtatgattttggtttattataatttttattttttgggtttaagtaatttttttgttttagttttttaagtagttgggattataggtatgtattattatgtgtggttaattttgggtttttagtagagatgggatttttttatgttggttaggttggttttgaatttttgattttaggtgatttgtttgttttggtttgttaaagtgttgggattataggtatgagttattgtgtttggaaaataggttatttttttaaataaaaaggtaatgatttataaaagtttatgaatagaatatgtaattagttgatataaatttaataggatttgtttaaaattagttaaatttaatatatttgaagtgtttttgtataaagtattatatgaagaaaagaagaatttattaatgttttaaaaaaatgggtttttttatagataatatgataatttattattaaaagtgttttgggatggttgggtgtagtggtttatgtttgtaattttagtattttgggaggttgaggtgggtggattatgaggttaggagattgagattattttggttaatatagtgaaattttatttttattaaaaatataaaaaattagttgggtatggtggtgggtgtttgtagttttagttatttgggaggttgaggtaggagaatggtgtgaatttgggaggtagggtttgtagtgagttgagattgtgttattgtattttagtttgggtgatagagtaagattttattttaaaaaaaaaaaaaaaaaaaaagtgttttaggagatataaggaaatgtaatattattttttttgaatatttttagtttaagattttttatttaataaaataggaaaggatttgaaattgagaaaatgtatttgagtataaatagtttgtgaaatataatatttttttttgtattattagagggttttattgaatttataattaatttgtttatttagtatgtaatttagatgtgagtgaggggttgggtgtagtggtttatttttgtaattatagtattttggaaggtagaggtgggtgagttatttgaggttaggagtttgagattagtttgattaatatggtggaatttagtttttattaaaaatataaaaattagttgggtgtggtggtgtatatttgtaattttaggtattttggaggttgaggtaggagaattgtttgaatttgggaggtagagattgtagtgagtttagattttgttattgtattttagtttgggtgatagagtaagattttattttaaaataaaataaaataaaaaaaatagatgtgagaggatagaggtgttttataggagtttgtattgtttttaattttatgtgtgtaggtatttattataggtaaatagtttttttatattttgtagttatatgattttgttattagtaaaaagaggtaaatagtttttgtagaatgaagggattatagttatgggattagagttatagaatgaagttttttttttaatattttttaatttgatgtttgaatttttttttttttttttttgagatagttttgtttttttgtttaggttagagtgtagtggtatgattttggtttattgttattttttgtgtttaaataatttttttgttttagtttttggagtagttgggattataggtgtttgttattatatttagttaatttttgtatttttagtagagatggggttttattatgttggttaggttggttttaaattttttattttaggtgatttatttgttttgggtttttaagtgttgggattataggtatgagttattgtgtatggtttgatgtttgaatttttaatgtagtattttagagaagggtgtttgggattttttgtgtttaagggattgataaagaaaaaagttttatttattatttgggatttgatgtatagatgaaaaatttaatatataataatggaagttggttgttagtaaattatattttagttttttagtatttttataagagatgatatttttagttgtttagtttttgtagttttagtatggtaatattaatgatgtttatgtttagaattagttaaaaagattataatttgttttttttagtttatttattttttattggtttatggttttaagtgtatttgaatgattatttttgggtattttttgttattgtttattagggtgttgttgattgtttttatgttttgtgggttggttgggaaggggagtttgggaaggatgtgttatttttaggaggttgtaagttattgggatgtttttagggatgattttttttatggttgtaggaagtttttttggagttatgtttatgatgtttggtggatatttgtatgttgtattgttgagtttgggatgaattgtttgttggtttattgttgattaaggtgttgatgtgataaataattttttgtttatatagttttttaagttttttgggatgtgatttgtgatgatttggtggattttggtggtagttgttttttttatttttagtgatgtttgtatgttgttttaggtagtgtgaggagtgaagatgagatttggtgtattttttaatggagtttgagtaaagttaaagggttttgatttgtgtaagttaagggttgttttttttattttgttttttttgaggatttgtgttaaggtttttttatttattaggttattatgggttgtgtttataaggaatgttttttgttttatttgttttatagtaaagttattgatgaggtggtggttatgtttattgagattgtagtgtaatgagatatagttattttgatatagtaaattttgtagggtgtattagggttttttttgtatgttttgggatttttttattttgttttataagtaggggttataaaatatgatgttgaatttaaaggttttggtttaaattgtaattgtttgttttatgtaattgaagtttatgaggtttagtgttttttatgaatgagggttatttttatggttattttgagaatttgttttatgttttgaatttgtgtgtttttttatagtgtttggtatagttatatatttttttggtagagattgaggatgtggtagatagtggagttggttgttttttttatggttgtggaggggatgttgtatatagtaatttggagtttattggtagttttgatgtttatgttgttgtagttatttgtttatttatatgattatttttagggttttgaatttttttaggtttttttttgtttagaatttttttgtggattttttgtgtggattgtgtgttatagaaggttatagtggttaggttttttaggatgggtatttttatggtgtaggttatagttatttagtggtgttagtagtgggagggggtgtagggggttgtttgtgatttgagggtggatagttttataagttttgtttaattgttgttttgtgattttgtgtttatttattagggttattttttatggaattttgtaatttttagattaaaaggtaaagtaggtttggtatggtgttttatgtttgtaattttagtatttgggaggttgaggtaggtagattatttgaggttaggagtttgagattagtttggttaatatggggaaatattatttttattaaaaatataaaaattagttgggtatggtggtgtgtttttgtaattttagttatttgggaggttgaggtaggagaattatttgaatttgggagttagaggttgttgtgagttgagattatgttattgtattttagtttgagtggtagagtgagattttgtttttaaaaattaaattaaaataaataataataataaaataaaaggtaaagtagttttttaaaaatttatggaaatttgtaggagtgtgtgtgtatgatgttattatgaatttaatatatatttgtttataaattttatagtttataggatgggttgtttattttttttttttttttttttttttttttgttgttaggttggagtgtagtggtgtgattttagtttattgtaatttttattttttgggtttaaatgattgttttgttttagttttttgagtagttgggattataggtgtatattattatatttggttattttttgtattttagtagagatggggttttattatgttggataggatggttttgattttttgaatttgtgatttatttgttttggttttttaaagtgttgggattataggtgtgagttattagttgtttatttttttaagggaatgtagttttgttagtttaaaaatatttaaggtgatgaaatttttgttttgggtagttagtatttatagtggaaaggtttttgttttttttattttatttggaggttgtgttgttttagtttagtgtagtatggtttttggtttagttttttgttttttgggttgtttttaagttattttaaa

SEQ ID NO: 310 - DNA, 10196 bp, Artificial Sequence
  chemically treated genomic DNA (Homo sapiens)
tttaaggtggtttgggagtggtttgaggagtgaaggattgaattaggagttatgttgtattgaattgaggtagtatagtttttaggtggggtgggaggggtgggagtttttttgttgtggatgttgattgtttaggatgagggttttattattttaaatgtttttgaattgatgaagttgtatttttttaaaaagatggatagttagtggtttatatttgtaattttagtgttttgggaggttaaggtaggtggattatgagtttagaagattgagattattttgtttaatatggtgaaattttgtttttattaaaatataaaaaatagttaggtgtggtggtgtgtatttgtaattttagttatttaggaggttgaggtaggataattgtttgaatttgggaggtggagattgtagtgagttgagattgtgttattgtattttagtttggtgataaaaagaaagaaagaaagaaagaaaagatggatagtttattttgtgaattatagagtttgtggatagatatgtattgggtttatagtggtgttatgtatatatatttttgtgagtttttgtaagtttttagaggattgttttgttttttgttttgttgttgttgtttgttttggtttggtttttggagatagagttttattttgttatttaggttggagtgtagtggtatgattttagtttatagtaatttttgatttttgggtttaagtgatttttttgttttagttttttgagtagttgggattataggagtgtgttattatgtttagttaatttttatatttttagtaaagatggtgtttttttatgttggttaggttggttttaaatttttgattttaagtgatttgtttgttttagttttttaagtgttgggattataggtatgaggtattatgttaggtttgttttgttttttgatttgagagttgtaaagttttataaagaatggttttggtggataagtataaaattatgagatagtgattggatagaatttgtgaagttatttatttttagattatgaatagttttttgtatttttttttgttgttggtgttgttggatggttgtgatttgtattgtggagatgtttattttgaaggatttggttattgtggttttttgtgatgtatagtttatgtaggagatttatgagaagattttaaataagggaggatttggagaagtttaaggttttgagagtgattgtgtggataggtaagtggttatgataatgtggatattaaggttgttagtgagttttggattattatgtgtaatattttttttatagttgtggaagaggtagttaattttattatttgttatatttttaatttttgttggaggaatatgtggttgtattagatattgtgggaaggtgtgtgggtttagagtgtggagtagatttttgaggtggttatgggagtggtttttatttgtggaagatgttaggttttatgggttttggttgtatgaggtaggtggttgtagtttgagttaaggtttttggatttagtgttgtattttatgatttttatttgtaggataagatagagaggttttagggtatgtagaggggattttgatatattttgtagggtttgttgtattagagtgattgtgttttgttgtattgtaattttaatgaatataattattattttgttaatgattttattataaagtagatgagatagggagtattttttgtgaatgtagtttatggtggtttggtggatgagaaagttttagtataggtttttaaggaggataggataggaggggtagtttttggtttgtatgaattggagttttttagttttgtttagattttgttgaaagatgtgttaaattttatttttattttttatattgtttaggatagtatgtaggtgttattggagatgaaggaggtagttgttattgagatttgttgagttattataggttgtgttttagaaagtttaagaaattgtgtgaataaggagttatttgttatattagtgttttggttagtaatagattagtaagtaatttattttgagtttaatggtgtaatatatagatatttgttaggtattgtgggtgtggttttaggaggattttttgtagttatggaaggaattatttttggaggtgttttaatgatttataattttttgagagtgatatattttttttaagtttttttttttaattagtttataaaatatggggataattgatagtattttaataagtaatagtagagaatgtttaaaggtaattatttagatatatttgggattatgagttagtgaaaaatagatgaattaagagaaataaattatggtttttttaattgattttggatataggtattattgatgttgttgtgttaaaattataagaattagataattgaagatgttgttttttatggaagtgttgaaagattaggatgtgatttattaataattgatttttgttattgtgtgttaagttttttatttgtgtattaaattttaaataataaatggagtttttttttttattggttttttgggtataggaggttttgaatatttttttttaggatgttgtattgagagtttaaatattgggttatgtgtagtggtttatgtttgtaattttagtatttgggagtttgaggtgggtggattatttgaggtaaggagtttgagattagtttggttaatatggtgaaattttgtttttattaaaaatataaaaattagttgggtgtggtggtgagtgtttgtaattttagttattttggaggttgaggtaggagaattgtttgaatataggaggtggtagtaagttaagattgtgttattgtattttagtttgggtgaaagagtaagattgttttaaggaaaaaagaaaaagagtttaaatattaaattaaaaaatattaagaggaaagttttattttgtgattttagttttgtgattgtagtttttttattttataggggttgtttatttttttttgttagtagtaagattatataattataaaatgtggagaaattgtttgtttgtggtagatatttgtatatataggattgaagatagtataggtttttgtgagatatttttgtttttttatatttgttttttttgttttgttttgttttgagatggagttttgttttgttatttaggttggagtgtaatggtgagatttggatttattgtaatttttgttttttaggtttaagtgatttttttgttttagtttttggagtatttaggattataagtgtatattattatgtttagttaatttttgtatttttggtagagattaggttttattatgttggttagattggttttgaatttttgattttaggtgatttgtttgtttttgttttttaaagtgttgtgattataggagtgagttattgtgtttggttttttatttatatttgaattgtatattgagtgggtaagttggttataagtttagtaaaattttttgatgatgtaaaaaaaagtattatgttttataagttgtttgtatttaaatatatttttttagttttagatttttttttattttattgagtggaaagttttgaattaaaagtgtttaggaagaataatgttgtatttttttatgttttttgaaatattttttttttttttttttttttgagatggagttttgttttgttgtttgggttggagtgtagtggtatgattttggtttattgtaggttttgttttttaggtttatgttatttttttgttttagttttttgagtagttgggattataggtatttgttattatgtttggttaattttttgtatttttagtagagatggggttttattgtgttagttaggatggttttgattttttgattttgtgatttatttgttttggttttttaaagtgttgggattataggtgtaagttattgtatttggttgttttgaaatatttttaatggtaagttgttatattgtttatgaagaaatttatttttttaagatattaataaattttttttttttttatgtgatattttatataagaatattttagatgtattagatttgattgattttaaataaattttattagatttgtattaattagttatatgttttatttatagatttttgtgaattattgtttttttgtttaaaaagatggtttattttttaggtatagtggtttatgtttgtaattttagtattttgatagattgaggtaggtagattatttgagattgggagtttgagattagtttgattaatatggagaaattttgtttttattagaaatttaaaattagttatgtgtggtagtgtatgtttgtaattttagttatttgggaggttgaggtaggagaattgtttgaatttaggagatggaggttgtggtgagttgagattatgttattgtattttagtttgtttgggtaataagagtgaaattttaatttaaaaaaaaaaaaaaaaaagatggtttattttaagtttttgtatagtatatttttgtttttgtgataaaagaaaaattttaaaattgttttaaatagaaaaataatggttatatgttttattttattttaattttttttttgagatggagtttttgttttgttatttaagtttgaatgtagtggtatgattttggttggttgtaatttttgttttttaagtttaagtagtttttttgttttggttttttgagtagttggtattataggtgtgtgttattatgtttagttaatttttgtatttttagtagagatggggttttattatgttgtttaggttagttttaaatttttgattttaggtgattagtttattttagttttataaagtgttgggattataggtgtgagttattagtttggtttagttgatagttttaattatgtaaattattatattgatttttattgattatttttattgttagtatttttgaatttaaattggttttggaaattttttaattatagtgaattttattttttatgattttataaatattgggtattgttgtggtatgttagaatatgagtttgtggttgggaaaggtagtattatatatgtagtttttttatttttatgtggttatataagaatgatatttgatttgtaatatttttttattaagagatatggattttatatgggttgtgtaatgtatttgtgttttaagttaagtgatattatagaaaagttaaaaagtttttaaaaatttgaatatttataaagtagaaaagttatagtaagtaagggttaatttattatggaagaaaaattttaaatatatgtagtgttgtttaagtgtataatgtttataaagtttagagtgttgtattgtaatgttttagtttttatatttatttattttttattgattttttagagtaatttttagttttgtagtttttatttttggtaagtattttatataagtgtattattttttattttttatgttgttttttttattgtattttttgtgtgtttagatatgtttagatatataaatatttattattgtgttttgtgggtagtaagttatttaggtgttgaggtaagagattgagggtatgggttgttttagtataataaaatatataaaataataagaattatattagatatagattatagatatgattatatataagtattattaattattagtttgtagtaattattttttatttaaatattataataatttttattttataattataatttaggaaaaattaggttatatagaggtatgagttgaagggatatggtgagaagtgattagaagataagtgtgtgagtttttgttatgtttggatagggttattagagggttttttggtttagtggaatgttagtgtttgggaagatgtttgttattaagtggattgtggtttagtagtagtgttagtgttaaggaaaagtatttattatttagtagattagtaaagggagtttttttttttttgggggagtttagagaagattttattttattatgttttgtggagggtttgatatgagttaggtttgtttgtagttatttggaggtttaattgtttttttgtgatgttgtgttttagtggttatattattggtttgtttttatgttttattttgtatatttggttttgttttttagatagtagtaataaaattagtgaaagtattaaaagtttttgatatgtagaaataatgtgtaagttgttttttttttttttttgttttagttgttaaatagggaagggttttttgtttagtggatatgtgatttatgtgattttatttattattggagatggtttatattttttattttgttttttttgttttgtatttaataaataatagtgtagtttggtatttggggttattattagtttttgtgttttggtggtagtggtttatttgggtttaggtgttttttatttttttgttttgtgtttttatttttattatttttagtttttgtatatagggagaaaaatttatagattttgtagggttggtttttatagtgttttaattgtatttagtatagtaatatattgtatagttttgtagtttaggagtaataggttatattatgtagtttaagtgtttagttagttatattatttaggtttgtgttagtatattttataatgatgaaattgtttaataatgtattttttagaatgtattttttttttttttgagattgagttttattttgttgtttaggttggagtgtagtggtgtaattttggtttattgtaatttttgttttttgggtttaagtgatttttttgttttagttttttgagtagttgggattataggtgtgtattattatgtttggttaatttttgtatttttagtatagatggggtttatattatgttgtttaggttggttttaaattttttagttttttaaagtgttgggattttaggtgtgaattattgtatttggttagaatatatttttattatttatttatttatttttttttaattgattatttttgggtgttttttgtagagggggatttggtagggttataggatgatagtggagggaatgttagtagataaataagtgaataaaggtttttggtttttttaggtagaggattttgtggtttttggtagtgtttgtgtttttgggtatttaagattagggagtggtgatgatttttaatgagtatgttgtttttaagtatttgtttaataaagtatattttgtattgtttttaatttatttaattttgagtggatatagtatatgttttagagagtatagggttgggggtaaggttatagattaataggattttaaggtagaagaattttttttagtatagaataaaatgaaaagatttttatatttatgtttttttatatagatatggtaattatttgattttttaattttttttttattttttttgtttttttattttataatattgttattgttattatggtttgtttttaatgagttgttgggtatattttttagatggggttgtggttaggtagaggggttttttattttttagtaggggtggttgggtagaggtgttttttattttttggatggagaggttggttgggtggggggttgatttttttttattttttttttggatggggtggttggttgggtagaggggttttttaatttttagtaggggtggttaggtagaggtgttttttgttttttggatggggtggttggttgggtgggggattgatttttttattttttttttgaatggggtggttggttgggtggggggttgatttttttattttttttttggatggggtggttggtttggtgggggtgatttttattttttttttggatggggtggttgttgggtggagatgttttttattttttagatggggtggttgttggatggaggggttttttattttttagatggggtggttgttgggtggaggggttttttattttttagatggggtggttgttaggtagagggttttattttttagatggggtggttgggtagagatgttttttattttttagatggggttgtggttaggtagaggtgttttttatattttagatggggtggtggggtagaggtgttttttatattttagatgatgggtggtttggtagagatgttttttattttttagattgggtagttaggtagaggggttttttatattttagatgatgggtggttaggtagagaagttttttattttttagatggggtggtggtggggtagaggttgtaattttggttttttggggggttaaagtaggtggttgggaggaggttgtagtgagttgagattatgttattgtattttagtttgggtattattgagtattgagtgaataagattttgtttgtaattttggtattttgggaggttgaggttggtggattatttgtggttaggagttggagattagtttggttaatatagtgaaattttgtgtttggtggagattaaaaaaatatgaaaattagttaggtgtggtggtgtgtgtttgtaattgtaggtatttggtaggttgaggtaggagaattaggtagggaggttgtagtgagttgagagggtagtagtatagtttagttttggtttggtattagagggagattgtggaaagagagggagagggagattgtggggagagtatatatttttattattaaattatgtatgattgtgtatataatatttttataggttaaaagtagttaaatattggttatgagatatatttagtttaagtatataaataattgtagaaggagaaagtgaaattttttttattttttgttttatttatttattataaagtatatagaagttagaataatatttgttttttgtaattttagatttttttttttttgtttttttaaatttgttttatgtttggtgatttttttttttttgatttttttttattaggttgtaggtttttggtttatattttttttgtgtttttaattatttttgagttttataatttttggttttataatttttttgtattaaggagtaataaataaaatttatgtttgaataaagaggttaaaatagtaatttaggatgtttgtgtttgtgtattttgggtgtatagtatttaggttggtagtttagtattggtttatttgtgagagtaattaagatgatttttggagggtttaattgtttttttagttttgaattatattttttagaaggtttagttgtgtgattatttttttatgtagatttgttttttttttgaggttgtttagtgtttgggggtagtaggatgggtttgggaattaagtttattttaaatatgttggagtggttttttttgggggttaaggtttgagtttgaggtgggattttatgaggtttttggggtgtgagtggtttgattagggggggtgatttttttggtggggttgatgtaaggtgtggataggaattttgatgattgggaattattttgtttggttttgatatgtttttgattatgttttttagaggtttttttggtaagattgtattttttgtggtaatttagtttttaatttatgtgttggtgggatttttagggttttattagtaattattttagtgttggggagggttttgttgttttgaaagttggtaaggtttgaggtgagaaatttgggagagggtggggttgggggttaagttttggttttgtgtggtggtggaggtgagattgaaagtgtgtgtttgtgtttgtgtggaggtgtgtggtgaatgattgtgtgattgtgataggttgtttttgtgatgagtgtgtttttaatgtttatattgtgtgtagtatggttttggagattgtggttgttggtgtgtgtgtgagagggagtaggattatgtgtggtattgtgtgtgtggttgtggggagtttgtgtttggttgagtgttattgtgtttgtttttgtagtggtgtgtgattatatgttgtgtgattgtgtgtggtagagtttaggtggggatatttgtgagtaattgtatgtttttatttgtgtgtgtggttgtggttaatgtgtgattgtgattgtgatttggtataggtgtgtgttgattgtgataatgtggttgtgattgtgattgtttttttggtaagtgtgtattt

SEQ ID NO: 311 - DNA, 1231 bp, Artificial Sequence
  chemically treated genomic DNA (Homo sapiens)
ttatttaattggtgatatagtttggggttttgttgttttttggtggttattatggatttttgttttttttatagaaggtagttattgtaatgtgtgtggttttagttgtgttatatttggtttttgtgattagggtttgaggaatttgtgttatgaagtgtgtgtttgttattgtagggattattagttttgatgattttattgtgtgtgtgttggtgtttgatagtttgtaagtgagtgagggaggtgagtaggtggtggtttggtttgttatttgttatttttggttatattgttagttgtgttagttttgtttgattgttgtgtttggaaagaaatttttgtaattttattataggtgttgttgttttttagttggtttttgtttatgtttggtggggtttttttttggttatttggttatttggggttgtttgttttttttttttattattttggttgttttttttttttatttttttagttttttttttggtttgtttttgtgttttattttttgtttttgtgttttttgtttttttttttaatggttttgtttttttgagtttgggttttttattgggtttggtagtttttttttaggtttttttgtggattgtatgttggtgttggtgtttgagttagttgagtttgttttagagtttggttttttttttttagtatttggttggagtttgtgtggtttttttttttagtgtgtgttgtttttttagggtttttggtttttgtagttgattaagtgaggtagaatgggtagtgtttgggttttttttgagtttgtgattttttttttaaagtttttttttgttgtggtttttgtgggattttgtgagttgggttgtttagatttatgagtgtttgggaggttttttgttgggttttggattagaaaatagttttgaaaattaagtgaaattggttatagataggttttttggtggttgtgttttgatgttaatgttaaattttagtagtggtggtggtttttgttttgttttatatagttagtttaaaaggtttttatattttgatttttttttttagaaaattgagagttttggttataattgatttattttgtaaattggtagaggaatggtggtatttgaattttttagtattgagttgtttattttggatgtttataggtataaggattttttgaaagaagatatttagaaagtagattttgttattagttatgtaggta

SEQ ID NO: 312 - DNA, 1231 bp, Artificial Sequence
  chemically treated genomic DNA (Homo sapiens)
tatttgtgtgattaataataagatttgttttttgaatgtttttttttaaggaatttttgtatttgtaaatatttagagtaaatgatttagtattgaagggtttaggtattattgtttttttattaatttgtaggataagttggttgtaattaaggtttttgattttttgaaagaggaaattagaatgtgagggttttttaaattggttatgtaaaatagagtaggaattattattattattaaagtttgatgttaatattggagtatggttgttaaaaagtttatttgtggttgattttatttagtttttaaaattattttttggtttggggtttgatgaggaattttttaagtatttatgaatttaagtgatttagtttgtagagttttgtgaaagttatagtaggaaaagattttggaaaaggagttgtaaatttggggggaatttaggtattatttgttttgttttatttgattaattgtgagaattgggagttttgaggggatgatgtgtgttgaggagaggaattgtgtgggttttggttaagtgttgaggggaaggagttgggttttgaggtgagtttggttggtttagatgttggtgttgatgtgtggtttataggggggtttgaggaaaaattgttgagtttggtggaaaatttgagtttggaggggtggagttgttggaaggaggggtggaggatgtggaggtggagaatagagtgtgggggtagattggaaaaggagttgaagaaatgagggagaggagtggttggaataatgggaagaggaaataggtaattttgagtggttgggtagttggagaagggttttgttgggtgtgggtagaagttagttaaggggtagtggtatttgtggtagagttgtgggggtttttttttgagtgtgatggttaggtaaggttaatgtggttggtagtatggttggagatggtgggtggtgagttaagttgttgtttgtttgttttttttatttatttgtagattgttgggtgttgatatatatgtaatgaggttgttaaagttggtggtttttatggtaataaatatgtattttatggtgtgggttttttaagttttgattgtaagggttggatatgatgtaattgaggttatgtatgttgtagtgattgttttttgtgagggaggtggaaatttgtaatggttgttagggggtggtggggttttgggttgtgttattggttgggtgg

SEQ ID NO: 313 - DNA, 16425 bp, Artificial Sequence
  chemically treated genomic DNA (Homo sapiens)
ggtttttgtgttttggttttttttggtgttttttttttgtttgtttttttttagtattatgatttggtgttttttatttagtttagtgttgtttgttagagttttgggaattttttaagttttgtaaaagttttttttggttaggttgtagttaatgtttgtagttagagggtgggtgggtagggttgatggtggttttttagttgttaggtaagagatttttagttggagggtgggtgagtagggttgatggtgtttttttagttgttgggtgagagatttttaggtgtttaggttttttgggagggtgtggttggggttttttgggtttggtgtttggggagttggttagtggttatttatttttgagttttttagatttgtgtttatttggtatatgtgttgtgttttagggagagttgttgtgttttggggttttggtgttttggttttgatttggtttggttttagttttgggtttggagtttttatttttttggtattagtttttgtagtgttttgttttttggtattttttgagagatgtattttaaaaataggattgatttattgttggtgatgaggagagggtggtttgagtgtgagggggtgggtgttagttgttggagaagtttttgttaggtaggagggatgagtgggtttttagttttgattttttggtttttgtttatgtttgaaaatgaaattggtggtttgggtggttgttagttttttgtggttgatagaagaaagtattatagttgggtttttaaataatgagaatttatttattgagttttgggagttagagttttgtagttgaggggtttgtagggttatgttttttttaggttttttagaggggtttttttttgttttttttagtttttgttagatataggtgttttttggttgtggttttagtgttttagtttttgtttttgtttttatttaggtgattttttttgtgtttgtgttttttgtttttttttttataaggatatttgttgttgtgtttagataatttaggattttgaatttgattatatatgtagaaattttgtttttaaataaggatatataggttttggggttgggagtggatatgttttgttgggggttatgtttagtttttgtttgtaagtgtttttggatttttaggtgtttttaaggtgtaggatgtgagtttgtatttgtagatagagtttagaaaagttagataggttgaggggtggtgtttgtgaattagaaagaggtttgagggttgagtgtgggtttagtatgtgttttattattagttttgtaggggtagaggtttagggtggggttggttggtttgtggaaggtgtgagaagttgttgtggtaaatttaatttttggttaggagttggtttattgtggtttttgggttaaattttgttggaatttgtttttgtaaataaagttttattggtttgtagttatttttatatgtgttatttgtggttgttttttagttaagtatggtaaaggagattttaagtttaattaagttaaaagggtgatgttgggttttttataggtaagtttttgattttagttttgattgtattattgggaatgtaatttgttgaataaaggaggtgttggttgggggtaatggaaggaattggttgttattaggtgttggagttgtttgttagggtgtggttaaggtgttattattatagagtagagttataggggaggaaaggtttttgtttgatttttgggtgattagtttattaaggttttgaggaagttgaggtttttgaggtggaaggtggtggatggttggttagtgtgtgttttttgttgagtattgagggtgagttatgggttatttggtttttttgtgtatgggtagttagattgtagggaagatgttttggttttatagttggtaatgtagatagatgtgtatttgaatatgtaagtatgtattgagtgtttattgtatatagggtttttatatttttttgtagatggtttttatggtattgttgtaggtgggggtgttattgtttttaggttatagatgaggaaattgaggttaagattttaaggttatatagttgggaggttagagtagggatttttaggggttttgttttttaggggaagggagtgaaggggtggtttgtatggtgtgtgattatttttagtggaagttttaatatgggtgtggtttagttttttagggttttttaaggtagaggtggtttgggtttttgtagtgattttataatatattttaattgtagatggtggagattgtgggttgttttttggtttaagtggttttggggtttttgttttgtgtggagttatttgtgtttatgttgtttttatatattgttattttttgggtgttttggtgatgtatttgagggatattgttgttatggtgaattttgattatgttgttgtgtttgattttttttttggggttgggtgttttgttttttgttttggagtttttagagggggttaggagattgtttggaaagttttagttgggtaggtggagttttgtaggtgtgggaatgagggggttttttttttaaattgggaatgtttagtttttttttagttgtaaatgttttagatgttgtggatagattttttaatgggaagtgaatgtattgttgttgtgtttatattatgttttgtttttgtgaattaagttttttggtatgtagttgtgtttaagggtttatatagggtttgaggttgtttttatgtagtaagggtggtggtgttgagtagtggttgtagagtttgtgtggttttgaaagttgtatgtttgttttttggttttttgtagaggaagtttgttgattgttggtttttgtggttatatagattttttggttttgtgggttgtggttatgtggtttggggaggtgggtatggttggggagggaagttgagtattatgtttgttttggattttattgtaaaaatgagtgtttgtgttaaatttatttgggattttggtttttatgtggttttgtagggtttgtgtgaagagtgagtatttgttttttagagttttagatgatatgttattttgtaattttttttggggatattttttttaatttttttttgtatgtttatagggatttggggtgtttgtatgaggttttaaaatttatatttttgttgaagttgggtattttggagtttagttgttggggtttaggtgggaggaggtttggttattaagtttggagttatgttgggagggttgggagtttttttgtgttgttttttttgtttttttaggtagatttgttgtttttgttatttataggagtgtttttgggttaggtggtttgtttaaggttatatagggattgtgttgtgttaggtttgagttgtatttggtggagtagatagtattagttggttgtttgtggtgatagtgatgttggaaaatgggaaggtgggggtggagatggggatttgagttgttttggagggtttgggaggtagaatgtaggtaggtttttagtagttgaggaagagattagggtttgttgtgttgggtagtggttgggtggatggggatgggatttaaggtttattgattttttttattttttggggttgaagtttagttataatttgggaattaaaggaattaggaggggtggtgggttttgaggtagtagggagtgggtataggtgtggttggtagggtggtaggataggagtggattggtagaattagggtaggaggttatagttattgggtaggttttatgttgggtttttaagtttgtgattatagattttgtagtttttagtgtggtttagggggttttagggtttgggatagggtaaatttgttagtgaaggtttagaatttagttatgggagttagtgttgggggttgggtatagatatgaatattttgagtttatttttgtttttgtagtttgtgggttttgtaaggggaggggattgttttattttgtatgttgggagttgaagttttggtatggttgagtggttggtttgaggttatgattttagtttgggtttttgtattgttatggtttttttggggatgttaagggtgtgggtaggtggtgttggttggtgtttttgatggttatgttttttgtagattgtttgttgatgttggtttataaggataagttggagtgtattaagggtttgtgggagtgtagtagtttgatgttagaggatatttgtgggttggagtttggtttgttttatgagggtttggtttatatgttggttattgtttgtttgttttaggttattatgttgggttttgatagttatgaggttatgtgtgtgtgggatgtttggatttgttatgtgtttggtgagggtgagtgatgggggttggggttgggtgggggttttttgtttaggtgtgttggggttttttattaatgtgggttgtagaggtgggagtggttttagggaattgtgtaggaagatgggatatttatgggtgttttagggtggattgagttttagtttgggggtgtttatgagggtttgggagggggagtttgttgggttatggtgtttttagagttttttagtttgattgttagttataattggagtttttaatttaagttggtggtttttggagggatgtggttttttaaagttttgttttttgttttttatattggatagtggagtttagagtttggttaggaaggagagttttaggttgggtggttttattttagtttttttttaaaataggatgggagggagggagggaatagagggaggggagagggaggggaagggagtgtttttttgtggaattggttttggaagaggtggaatgttagttttagttttgtaggggttttgaatgggtgtttgggggtttttgggggttgagttgttttggggttgtgagtagaggtgggtggtgatggggttttgggtatttagtggtagagtaagtataattttgtattttttaagaaattaaaattagtgttaaaattttataatgagtaaaatagtagaatgtttattgagttgagttttggttttattttggtatttatttaataattttagtagttatagttgttttttttttaaaaatttgttattttaggttgggtatggtggtttatatttgtaattttagtattttgggaggttgaggtgggtggattatttgagtttaggagatagagattagattattttgggtaatgtggtgaaattttgtttttattaaaaatataaaaatgatggttaggtgtagtggtttatgtttgtaaattttgtgttttgggaggttaaggtgggtagattatttgaggttaggattttgagattagtttggttaatatagtgaagttttatttttattaaaaatggaaaaattagtttggtgtggtggtgggtatatgtaattttagttatttaggaggttgagataggagaattgtttgaatttgggaggtagaggttgtaatgagttgagattgtgttattgtattttagtttgggtaatagagtaggattttattttaaaaaaaaaagagttgggaggtggaggttgtggtgatttgaggttgtgttattgttttttagtttgggtgatagagtgagattttgttttaaaaaaataaatataaaaaaatttgttattttgattagtatggattttgtataattttattttttaaaatattgattaaaatattttggtttttgatggttgagttttttggttttggaggtgagtgttttgtttttttagttttgtttttaaggtagtagttttttttgttttattgagtggggagagagaagttgggggtttagtgggaggaggtgtggttggttttgtaggagggtgtaggggaaggagatattaggagggaagaattgtatttttttagaaagtttttttgttgggggttttttttagtttggtttagtggtatgggtttgttttttttatttgttggtgtagggttatggtatagaggttgttgggtattgtttaggtagttttattttgatagaatgtggtttgataaggatgtgtttgaggttatagtttggagtaggtagaggaggtagagaagggggaggtgggatgggaataggggtttttttggttttgggggttggagatggagtaggtggggtttttggtggggaggttgttgtttgtttggtgtgttgatttgggaagataggggaggtggggatagtatttaggattattgttttttttgaggtttttaggggtaggggtttgggtagagttagtgtataggattatgggggtgtttagggtttgggtgaatggttatttggatggagagagggttggtggtgttttgaggtttttgtggttaggttggggttttgatatagattttagattttttatatttgaattggaggttgggggatttttgagttttggtttttttttttgtgatggagttatatagttgtggagagagagtttttttggagaggtgttgggggtgggagtttagttagggtatttagttgttttgttttttttagtatttttgtggtgggaggggagggaggtggaggtttgaggttaggtttttttgggatttttttgtttttgaataaagatagtttttgggaggatggtaaggagagaagtgtagtttttaggtttttttgtggttgtgaggagtgttatttgtttattttgttgttgttgtttttttggttgatatttgggtggttgtttttatttgttttagtttggtttttgtttttgttgtttttttttgagatgtttttttattttatttgtttatagtggtttttgttgtttttttttatgatgtttttttgttttgtttgattgtgatgtttttttgttttgtttatttttgatgtttttttattttatttgtttatgatgtttttttgttttgtttgtttgtgatgtttttttattttatttgtttgtgatgtttttttattttatttgtttgtgatgtttttttattttgtttgtttgtgatgtttttttgttttgtttgtttgtagtgtataggttttatgtgatagtggttttaggtattaagttggagagtggtttggttattttgtatttttgtaatgatgtttttgttttggttagggatatttttttggttgttatggggtagtggaagttgtttgatttttggtgttatggggttgtgttaagtggatttatttttgaaggtgggattaggtgtgggtattgtaagtatggatgtgtggggttattgggtagtagtagtattttttattttttttgagaattgttggttttgggttggttgattttatttgtaggttggtttgttggtatttttagaatgtgttggtaggtggatggagtttttttatgtttgatgtttaaggttttttgtttgtaggaattttagtgtggagtgttgaggaggggttttggttatttttgtttttttttattggagggagagagtttagggatgtgaggaggggtttgaggttatagagttttagagttgtttatatttagattttatggaaaggaaaaaataaagaataaatgtatttagtagtggggagtgtgagtttttgtataagtattgtagaaatatatttttggattaagaatttttggtggatatgttagttattttgtttgtgggttgtttagagttgttttaatgtttttagtgaggtggttaggttgtgggtggggatggtttgagttttttgggtttgtgaaggtttgagagttgtttttatttagttaggggagtgagggaaattggagtaggaaggtatttagttttgtttagagagtttgaggtgtttgttggggttgtgtaggagtaggttgttttagtaattttttttatttttttttatgttgggtgtagatgtgttaggttgttttgtggatttgtagtttttgtggagggtgtgatgtttttttttttttttttggaggggtagttgtttattggttgggttgaaggtgggtagagggattttttgtgggtttggtttggggttgagaggattgagggattgtatttggtttatattggtgggggttttggtggagtttggatgtgtttgggtggaggaaatgtaggtaaggatatgggttatattggttgtttgggattttattttgtaaaggttagttggggtatgggtgtaagtttatttgggtgttatgttttgttattttttgtgttgggtgttgggagtaaatttagtaggttttgtggtaggagttagttttgttggggtttttgaggagatgatatttgatttttgaaaggggaatagggtagtgaggtttaggttttatggattgggggtgtatatagttagttgtaggaggtatgtgtggtagagttggtttggagttttggtttttggggttggtaggggttatagttagagtttaaagggttttggtttttttgggattggagagttagtatggatgggtagggttgttgtttatgttagttgtgagttggtgtggggggtggggtggggggtggtttttgggagagttaggatatttgttggggttttatttgtttttaggttttttttgtggtaggttagaggtttagtattggggttttgggagttattggggagtgggttggtggtggttgggtatagtgggtgggtttagtgtttttgttttttgttgtgtgggaagttagagttgtaggttgtagttgttttgatataggtagtttgttttgtttgttgtgtgttaggtttgggggtgtttggaggagggggatttatatttttttttttgtttgtggaattttttggtatgggtaggtagttggttggggtggtgttgtgtgtttattttttaagttggggtatagtaggaggatttgtttttttggagatttgtttattttgtttgggttataatggaatggggatattggatgttttttttttgaggttgtggaggtttatatttttgttgaggtgtgggtggttttttttttgttggtaaataattttatatttggggttgtgtttttttttagggtgaggttattgtgttgtttttttgggttgtttaaaagttgggggtatttttgtggggttgtttgttttgttgttgtttttttggggtaagttgttagagtagttttatttgtaaatttgtaaattaggttggttttatagaatttgaaaatttgtaaattgggttggttttatagaatttataaatttgtagattgggttggttttatagaatttgtaaatgggggttggttttatagaatttgtttttgtagtttagtgttgaatgtttttgtttttggtggtattttggtttgagagaggaagggttttgggaatttggttattgatggttgtatattttgtagggtaggtgggttttggaggttaggttggaaggtttggttgagttatttatttttgtttttagtaggttttgttgggttgtatttttttggagataggtgtggttattattttgggtggtttaggttgggttttagatttggttaagtggtggtgtttttaatgtagtattgagtgtaggttgtttggttggagggatggggagtttgtggtatgtgtgggtagtttggggttttttgtgggagggagttggtaatttgggtggtttaggggtagtggtattagttttttggggtttttgtagtagatgatttttaagagagggttaagtgtttagaatgggttttttttgtagtttggaggttagaaattttaaattaaggggtttttagggttggttttttttaaaagtttttggggaggatttatgggaaggttttttttgttttttttagttgttggtggttttggtggttttggtttgtggttgtgttattttagtttttgtgtttgttggtttttgtgtgagttttttttttagttttttgtagtttgtggatttagggtttatttggatgatttagggtgattttattttgagattattaattttatttgtagaggtttttgtttataggttttggtatgtgaatatattttgtgggttattatttggttgataattggggttattgggatggagaaatatttagaatttgaattttaataagtttgtgggtgttgttatatttagtttggaggttatagttgggttggagttgtgggaaggttttggaagtttttgggtgtaggaaatttatattttttttttttttagggataggttttagtttggtttttgatttttagaattgttttatttggttttgttatagttagttttgtagagagtagagagggtgattttggtttaaggtgatggttgtgttttatttattttgagatattgggtgtggttgtgtattatgggggttttggtgggggttgggtggagataggtttggttggttttggtgtttggggggtagaggtttttttgtggatagttgtttgtttagaatgggataggaggtggtttggtgatagtaatttttgggtttttagtgtggtttaattttttgtttttgttggttatgggtttgtagtgtggatttttggagtttggtttgagtgtatttggtatatggtaggtgatggtttgtggatagtttaggtttgtaggttttagttttatatatgggtaagtgattgggttttgtttttggggatggattgtgtgtggtggagagtgatgtagagagggttatttgttttgggataggtttagtttgtagtatagatggtggtgggttttagagagggtgagtttatttagagtttaggaagggagggttttggaggtgtagggggatgtttgagttgggttttgagggtgaatggaagtttttggaggtgttttttttttttttttttatttgttttttttagttgggtttagtttaaggattatatttgtttttttgtttagtttttgggggttgtttggagtatttgaaatttattttgatttttaaaaatgattaagaatgtggttaggtatagtggtttatgtttgtaattttagtattttgggaggtggaggtgggaggattatttgaggttaggagtttgagattagtttggttaatatggtgaaattttatttttattaaaaatataaaaattaggtaggtgtggtagtaggtgtttgtaattttagttattttagaggttgaggtgggaaaattatttgaatttgggagttggaggttgtagtgagttgagattttgttattgtagtttagttaaggtaatagagttaggttttgttttaaaaaaagaagagtaaagaatgaaaatttgaattaggaggtttttgttatatgaatgtggtatttgtttagttttggagagttttttgttggttatttttggttattgtagtttgtgggggtagtttggatagagttggttggaattttggtttttgttaggtagtagggagtgtttttagtagttttttattgttgggtgttgggtttagggattagatggtttggttttagaggttgtgtgagattgagtgaggtatttttagtttttagagggtgtgaggggagttaggaggggtatagattttaggttgggggtattgtggggaagttttttggaggggtgagttttaggggatttttgtagggtgaataggagttagtttagttgttagagggtaaggggtggaggggggtgaaaagggtattttagatatttttgagtatgaatgggtgttttgaagggttgtgtaggagttttgttgggggggataggaggtgtgagggtggaggaggaggaggagatagggttgggttgtagagagttggttaattggattagtgtttgtttgtattattgttttggagtagtagggagttattgaaggtgtttgagtatggggagtgttttatatgttaatgttgattttggggtgtagatgagtttggaggaagaggttggtaggggttagagaaggttttgattgaggtttagaagatggagggtgaggttgttttaggtagtagttgtttggttgggggatgggaattttgtggattgtaggaatgttaataaggtggtgatggataaggggaggagggttggtttgggaagggggggttttttagagtggtgtttttggattggggttgttttaggagggtagaggaggggtgggagttaatatttattgttaggttttaggtttttttttatttgagatttattaggtggggttatttttaagtgtataagaagttgttattttgggggatggagagggttgagggttatgttattaagattttttagttttgtttatgtttatttggtatgagttatttaggatattttggttattttgatgtttgttttttgaggagttgggattatgagtatttaagattttgatattaaggggtagttatgagggtatttaagaatatttagatggaaattattttagatttaattggtttattaaatgtttgtgtggaggagtatttttttttttaagttggtgagttttggagttagtgtaatagtttttttattggagatgtgttttttaggaagtaggtgtgtttgtaatgtgggtgaggtttgtttgttgtttagtaattttagtttttgtttagagttggtgttgttttgagttttgtagtttttggttttttgtttgtgttttgttgattttgttttgtttttttgtgttttttatgttttttttttttatttttatgttttttattttttataatagggtttttatatagttttttgggatatttgtttgtgtttaaagatgtttgatgtgttttttttatttttttttattgtttattttttaatagttgagttaatttttatttattttgttatatttagtggttggtggttgttttttggttggtaattttgtgggttagggatttggatggggtttagtgaggatagtttatttttgttttatgaggtgttgtttggggttttttgggtagtggtatttggttatggtggggtttaaaggtttaggaaagtattgtgttggttgttggttgggttgttttagtttttttttaggaattttattttttgataggatattttgggttttttaataggttttaagagagtagaagttgttaggtttttgatggttttggggtagggttgggagagtattttttatgttattttatgttagagttattattggttggttttgattttagggagggagtggattagtttttggagaaggagtggtttttgagggtagggataggggaaatagagtggttggttttgttgtagttatatttgtgtgatatagtaaaatggggtaggttttgtttttttttttttttttaaatatataggtaaataggaaatatgtgtattttgttttggggaaggggtaggggggtggttagtagttttttatttatgtttttttatttaaggttgagtattgggggttttttggttatgggtgtttgggtggatattgagattatagatggtttgtgttttttgttggtaaggtgtttagtttggtagttgggatggtagtaggtggggttgaattttagaggaggtgtttgtgagagtattatagaggggttgttggggttaggggattgaagggggttagaggttaagaaaagtattatgaaaggtgttgttatgtggtttgagtttggaaaggtttggggtgttttaggtggttaggggtgtggagggtgggggtggtagttttttgagtggagatgtaggggtgtggagggtggggatggtagttttttgagtggagatgtaggggtgtggagggtggggatggtagttttttgagtggagatgtaggggtgtggagggtggggatggtagttttttgagtggagatgtaggggtgtggagggtggggatggtagttttttgagtggagatggtaggtagatttggtgtgtagagggagttttgagtatttttaagattggggggggttgggtgggagtgggggtggagtatgaatttagggaggtttagtgagagtttagttgtgtggtgttttgggaggttatggtttaagattttggtagattagtattggagatgggtatttttttttagggttattgatgttagttttgttggtatggatgatgggggtggttggtgagggtgttgtgtgggtatgtgggagtttgaggttggtggtgggttgtgttttaggttttgtttggttgattgtgtttttggggtgagtgatgttttgtagatgttgtatggaatgtggggttggttttattttttttgtaatgtggttttttatagttgggggatttattgttttgtggttattgttagttgtttgtaagtttaggattagagagtttggttttttgtgagagttggggttgtgttggttgagttttttatagggaggggtggattatggggatagggagtgattgtttggtattgagtgagttagttagtagatagtatgatggttttttttttgtttgtttttagggtttggtgtaggtttttttttgtttattttatttagtttgggggttttattttattatggtttttatgagttttttggggtatttttttggatggtattgtagtgggtattggttttttttttatgtttatttttaattttgattaggagtattttttatttatagtaggattggaagttttattgggttagaaggtgtatagggggttaggggatttggatttgagtttattttgtggttgtgtgatggtggataggtggtgtgttttttttgggttttagtgttttttttgttaaagtaggaatggtgttgttttatgatttggtttggggatattatgtggaaggaagtatttatagtataaggtgttgtttgtttttgtgtgtttggggtggttgttaaggggttggtagtgttgttatgtgttggggttggtttgagttttgtgtttttggaatttatagtttgtgttttgtgaaggtagagtatgattgggtagtaggtagtgggggttttaatgttgagattttttttttttttaatttttgtttattttggtgtttttttttttgtgtatttttttttgggtaatgggtagaggttttggagtgggtgggatttttgtgaggtgatgttagttggagtgtttagttgggtgtagttagtttagtggtttatttatgtggttgttagggttttatttatttttggttgggagggtagtgtttttgtgatttgtagttggggtttttttatgggtggtggttgtattgttttgttagtgatgttgggttggtttttgggggtttttttgttgttgtgggggtgtaggggtggatgttggttttaggatgttgtatatggttttagggtagtatttatatattggtagttttagttttttttgaaagatgattgaggaggtggggaggatgtggtgttggttagtagtgatggttgtagtatgtgtgggtaggtgttgtgttatattttttataaatatttgaatgtagtttttttaatagtttgggggaaggaagtgtggttatatggtagtttttttgggatgtgattttagttttaggtggtatagttttttttttttgtggttttggagttttgaggggattttatttgatgtttttggggttttttggttgttttatttgtttttaagatggttgtgggggtagggttgttgggattttggggtagaggagggattgattaagtgtttgttgggtggtagagtagttatatttttttatttttttaagtaagtttggaaggtaggtatgtgggtgggggtatttatttgtttagggtagggtatttttttttttttttttatgttttgttggttgtaggatttaggatgggtggggtagtatttattttagtgtttaagtttgaagggtgtggtggggtttttggggagtttagaggttttggggatttagttttatagagttaggtggggtgttggttttgggtatttggatttatggggttaggtggggtgttggttttgggtatttgattttgtggggttaggtagggtgttattgttggtttttggtggagtttgttgtggttttttgtgttttttttttttagggtttttagtttgtttttgggttagattgatttgtttttgttttttttttgtaggggttggtgttttttttttgtttttggttgagggggagtagattagttttttgtttgattgtattgtttgaggtattttttttattaagggtttttttgggttgtggttggttttattaggtgtgtgtgggagttt

SEQ ID NO: 314 - DNA, 16425 bp, Artificial Sequence
  chemically treated genomic DNA (Homo sapiens)
aggtttttatatgtatttggtagaattggttgtagtttaaaggggtttttggtgggggagatgttttggatgatgtagttgaataggaagttgatttgtttttttttggttgaggataggaagaagatgttagtttttgtagaggaaggatagagataggttagtttggtttgagggtgggttggggattttgaagaggaggaatataggaaattgtagtaaattttattaagagttgataatgatattttgtttggttttatgaagttagatgtttagagttgatattttgtttggttttgtgaatttgggtgtttagagttgatattttatttggttttgtgaagttgggtttttagagtttttggattttttagggattttgttgtattttttaaatttgggtgttggggtgagtgttgttttgtttattttaggttttgtagttgatagggtatggggaggagggagggggtgttttgttttggatagatgggtgtttttgtttatatatttgttttttgggtttgtttggggggatggggggatgtggttgttttgttatttagtaggtatttgattagttttttttttgttttaaggttttagtgattttgtttttatagttgttttgagggtaaatgaagtagttaggagattttagagatattaagtagggtttttttagggttttaaggttataggagaagggagttgtgttatttggagttggggttatattttaggaaggttgttatgtgattatattttttttttttgggttgttgggagggttgtatttagatgtttgtaaaaggtgtggtatggtatttgtttatatatgttgtagttgttattgttggttagtattgtgttttttttatttttttggttattttttaggggaagttggagttgttagtgtgtgggtgttgttttgaggttgtgtgtagtattttggggttagtatttatttttgtatttttatagtagtaggagggtttttagggattagtttagtgttattggtagagtgatgtagttgttatttgtggagaagttttagttgtgagttatgggggtgttgtttttttggttaggggtgaatgaagttttggtggttgtgtgaatgggttattgggttggttgtatttggttggatattttggttggtgttattttataggaattttgtttgttttggggtttttgtttattgtttaaagaaaggtatgtaggagggaaggtgttggggtgggtaggagttggggggaagggaaattttggtattagaatttttgttgtttgttgtttagttatgttttgtttttatggaatataggttgtagattttagggatatggaatttaggttagttttgatatgtggtgatgttgttggttttttggtagttattttgggtatatgagggtgagtggtattttgtgttgtggatgtttttttttatgtagtgtttttaaattgggttatgggatagtgttatttttattttagtaaaaaggatattgaggtttagagaaggtatgttatttgtttattattatatagttatgaggtggatttaagtttaagttttttggttttttgtgtattttttggtttgatagagtttttagttttattgtgggtgaggggtgtttttgattagaattggaggtgggtatggaggggaggttaatgtttgttgtgatgttatttaggaggatgttttgagaggtttatgagggttgtgatggggtggggtttttaagttgggtagggtgggtagaagagagtttgtattaggttttgggggtaggtaaggagaaggttgttatgttgtttgttggttggtttatttagtgttaggtagttgttttttgtttttgtggtttatttttttttgtgaagggtttagttggtatagttttagtttttatgaaaggttaggttttttaattttgagtttatagatagttggtagtggttatgggataatgagttttttgattataaaaaattatattatggaaggagtggagttggttttgtattttatgtggtgtttgtggagtgttatttattttgaagatatggttaattgggtaaggtttggagtatagtttattgttagttttgggtttttatgtgtttatgtgatatttttgttagttatttttattatttatgttagtagagttgatattagtggttttggaggaagatgtttatttttaatgttggtttgttaaggttttgggttatggttttttaggatattgtatgattaggtttttgttgggtttttttgggtttatgttttatttttgtttttatttagttttttttggttttgggaatgtttaaagttttttttgtatattaggtttgtttgttatttttatttaggaggttgttgtttttattttttatatttttatatttttatttaggaggttgttgtttttattttttatatttttatatttttatttaggaggttgttgtttttattttttatatttttatatttttatttaggaggttgttgtttttattttttatatttttatatttttatttaggaggttgttatttttattttttatatttttggttatttagaatattttagatttttttagatttaggttatataatgatattttttatgatgttttttttggtttttggttttttttagttttttgattttgatagtttttttgtggtgtttttatggatgttttttttggggtttagttttatttgttgttgttttggttgttaggttgagtattttgttggtagggagtataagttgtttgtggttttagtgtttatttaagtgtttataattaggagatttttagtgtttggttttgggtggaaagatataggtgagaggttgttgattgtttttttgttttttttttaagatagggtgtgtatgttttttgtttgtttgtgtgtttggggaaaggggggagaatagggtttgttttattttgttatattatataggtgtgattgtagtaaagttggttattttgttttttttatttttgtttttagaggttgttttttttttagaggttggtttattttttttttggaattgaagttagttagtgatggttttggtataaagtggtatgagggatgtttttttagttttgttttaagattgttagaggtttggtagtttttgtttttttggaatttattgagaagtttaaggtgttttattggagggtgaggtttttggagggaaattgaggtaatttagttaatagttggtatagtgtttttttgggtttttgggttttattatagttaaatgttattgtttgagggattttaggtagtattttatggggtagagatgagttgtttttattgagttttgtttagatttttggtttatagaattgttagttagggaatagttgttagttgttaggtgtggtagggtaaataggagttagtttagttgttagagggtaagtggtggaggggggtgaaaagggtatgttagatatttttgagtataaatgggtgttttaaagggttgtataggagttttgttgtgggggataggaggtgtgagggtaagaggaaagagtatggaagatgtagagaagtaggatagagttagtagaatataagtagaaggttaggagttgtggggtttagggtggtgttaattttggatagaggttggggttgttgagtggtaggtaaattttatttatgttatagatgtatttgttttttgagaaatatgtttttagtgaaaaagttgttgtattaattttaggatttattggtttgagaaagaaaatgtttttttatgtagatatttaatgagttaattagatttaagatggtttttatttgaatatttttgagtgtttttgtggttgttttttgatgttagaattttaagtgtttataattttagttttttagagaataaatattggggtgattagggtgttttggatggtttatgttaggtaggtatgggtaggattgagaagttttgataatatgatttttagttttttttattttttaaggtggtagttttttgtatatttgggagtggttttatttagtgggttttgggtggaggaaggtttggagtttggtagtgggtgttggtttttattttttttttgtttttttgaagtagttttagtttaggggtattattttagaaggttttttttttttgggttggtttttttttttttgtttattattattttgttaatatttttgtaatttatagggtttttattttttaattaggtagttgttgtttggggtagttttgttttttattttttggattttaattagaattttttttggtttttgttagtttttttttttaagtttatttgtattttggggttaatattagtatataaaatattttttatgtttaagtatttttaatggttttttgttgttttgagataatggtgtaaataaatattggtttaattagttagttttttataatttagttttgtttttttttttttttttatttttatgttttttattttttttaatagggtttttatatagttttttgggatatttatttgtgtttaaagatgtttgaagtgttttttttatttttttttattttttattttttgatagttgagttaatttttatttattttgtagaagttttttgaggtttgtttttttagagagtttttttgtagtgtttttagtttggggtttgtgttttttttggttttttttgtattttttgaggattgaaaatgttttatttagttttatgtagtttttgaggttggattgtttgatttttaggtttagtgtttggtaatgagaaattgttgaaggtgttttttgttgtttgatagaggttagggttttagttagttttgtttaggttgtttttgtaggttgtagtggttaaaggtggttggtagggggttttttagagttgggtagatgttgtgtttatgtagtaagagttttttagtttaggtttttattttttatttttttttttttgagatagagtttggttttgttgttttggttggattgtaatggtgggattttagtttattgtaatttttaatttttaggtttaagtgatttttttattttagtttttggagtagttgggattataggtatttgttattatatttgtttaatttttgtatttttagtagagatggggttttattatgttgattaggttgattttgaatttttgattttaggtgatttttttatttttgttttttaaagtgttgggattatagatatgagttattgtgtttggttatatttttaattatttttaaaagttaaaatgagttttaaatgttttgggtggtttttagaggttgggtaaagaggtagatatggtttttggattggatttagttggagagagtaggtaaggggggaaaaagggggtatttttaaaagtttttatttatttttaaggtttagtttaaatgtttttttgtgtttttaaagttttttttttttaggttttgggtgggtttattttttttggggtttattattgtttgtgttgtaagttgagtttgttttagggtgagtggttttttttgtattattttttattatgtatagtttatttttgaaggtggggtttagttatttgtttgtgtgtgaggttggagtttgtagatttgagttgtttatagattgttgtttgttatgtgttaagtgtgtttgggttaagttttaggagtttatattataggtttgtgattaatagagatggggaattgggttatattggggatttgggggttgttgttattaagttattttttgttttattttgaataggtagttgtttatagagagatttttgttttttaggtattaagattagttaggtttgtttttatttgatttttattagggtttttgtgatgtatagttatgtttagtgttttaggatgagtgaggtgtagttattgttttgggttagggttattttttttgttttttgtagagttggttgtggtggggttaagtgaggtggttttggggattgggggttaggttaggatttgtttttggggaaggagggaatgtggattttttatatttaagaatttttagggtttttttatgattttagtttagttgtgatttttagattgaatgtgatgatatttatagatttattgggatttagattttggatatttttttgttttagtggttttagttgttggttaaatggtggtttataaaatgtgtttatatattagggtttgtgaataggagtttttgtggatggaattgatggttttgggatggggttattttgggttatttaggtgggttttaagtttatagattgtaagagattgaagaggaggtttatgtaggagttagtaggtgtagggattggagtggtatagttatgagttgaggttgttggggttattagtggttggaaggggtaggaaggatttttttatgggttttttttaagagtttttggaaaaagttaattttgaggattttttgatttggggtttttggtttttaggttgtagaaggaatttgttttggatatttggtttttttttgggggttatttgttatagaagttttaggaagttgatgttgttgtttttggattatttgagttgttggtttttttttgtaggaggttttaggttgtttatatgtgttgtagattttttgtttttttagttagatggtttgtatttagtgttgtgttgagaatattattgtttggttgagtttaagatttagtttaaattatttagggtggtggttatgtttgtttttaggaggatatagtttagtagggtttgttggggatagggatgggtggtttggttaagttttttagtttggtttttagaatttatttattttatggggtgtgtagttgttggtgattgaatttttagagtttttttttttttaggttagggtattattggggatgagaatatttagtattgagttgtaaaggtgggttttgtggggttagtttttgtttgtgggttttgtggggttagtttagtttgtaggtttgtgggttttgtggggttagtttggtttgtaggtttttaggttttgtggggttagtttggtttgtaggtttgtgggtggggttgttttaatagtttgttttggagaggtagtagtaagatagatggttttataagagtgtttttagtttttgagtagtttaggaaaatggtatagtagttttgttttggggagaagtatagttttaggtgtgggattgtttattagtggaaaaggggttatttatattttggtagggatgtgaatttttatggttttagaggaaaaatatttagtgtttttattttattatggtttagataaaataagtaggtttttaaggaaatgggtttttttgttgtgttttggtttagagggtgagtatgtggtgttattttggttggttgtttgtttgtgttaaggaattttatagatagaaaggaaggtatgggttttttttttttaggtatttttaaatttagtatataatagataggataggttgtttgtgttaggataattatagtttgtagttttggttttttatatgataaaggatagggatgttgggtttatttattgtgtttagttattgttaatttattttttagtggtttttgaagttttagtattgaatttttggtttgttgtagggagggtttgggggtagatgggattttgataggtgttttagtttttttgggaattattttttattttattttttgtattagtttatagttggtataggtagtggttttgtttatttatattggttttttaattttagaggggttaaggttttttggattttggttatggtttttgttagttttaggggttgagattttgggttagttttgttgtatgtgttttttgtagttggttgtgtatgtttttagtttgtggagtttgagttttattgttttgttttttttttaagggttagatgttgtttttttaaaggttttaatagggttggtttttgttataagatttattgggtttgtttttagtgtttagtgtagaaggtggtagaatgtggtatttagatgggtttgtgtttgtgttttagttggtttttgtaggatgaggttttaggtggttagtgtggtttgtgtttttgtttgtgttttttttatttagatatatttaggttttattagagtttttattagtgtgagttaagtgtagttttttagtttttttagttttaaattaggtttataggaggtttttttgtttgtttttagtttggttaatgagtagttgtttttttagagagaagagaggaggtgttatattttttgtggggattgtaggtttatagggtaatttggtgtatttgtatttaatatgggagaaagtggagggggttgttggaataatttgtttttgtatagttttggtgggtattttagattttttgggtagggttgggtgtttttttgttttgattttttttatttttttggttgagtgaggatagtttttaggtttttataggtttagaggatttaggttatttttatttatggtttggttattttattggggatattagggtagttttgggtggtttataggtggggtggttggtatgtttattaggaatttttggtttaagaatatgtttttgtggtgtttatgtgggagtttatattttttattgttaaatgtgtttgttttttgtttttttttttttatgaaatttggatatgagtggttttgaggttttgtggttttaggtttttttttgtatttttgaattttttttttttagtgaggaagagtagaggtagttgaggtttttttttgatattttatattgaggtttttgtgggtagaggattttggatattgagtgtggggagattttgtttatttgttggtgtattttggaaatgttagtaggttagtttgtaagtggggttggttggtttgaagttagtagtttttaggggaagtggggggtgttgttgttgtttagtgattttatatatttgtatttatagtatttatatttggttttgtttttaaagatgaatttgtttggtatggttttgtagtgttggaggttagatagtttttattgttttgtgatagttggggggatgtttttggttaagatgaggatattattgtagaggtgtagggtagttgggttgttttttaatttggtgtttggagttattgttatatggaatttatgtattgtgggtaggtggggtaagagggtattatgggtgggtagggtgagaggatattatgggtgggtggggtgagagggtattatgggtgggtggggtgagagggtattatgggtaggtggggtgagagggtattatgggtgggtgaggtgagagggtattgagggtgggtggggtgagagggtattatggttaggtggggtgagagggtattatgagaggaggtaataggggttattgtggataggtggggtgagagggtattttgggaggaggtagtaggggtaggggttaggttggggtaggtgggggtagttgtttaggtgttagttggggaggtagtgatggtaggatgagtaaatggtattttttatagttatgagggggtttgggggttgtatttttttttttgttatttttttaggaattatttttgtttaggggtaaggaagttttagaggggtttgattttggatttttatttttttttttttttattatggaggtgttagggaggatagggtagttgagtgttttggttgggtttttatttttggtatttttttaggaaggttttttttttatagttgtgtggttttattatagaaggggaaattgaggtttagggattttttagtttttagtttgggtgtggagagtttggagtttgtattgaggttttagtttggttatgggaattttagggtattattggttttttttttatttaggtggttatttatttaaattttgagtatttttatggttttgtgtattggttttgtttaggtttttgtttttgaaagttttagagaggatagtggttttgaatgttgtttttattttttttgtttttttaggttagtatattaggtagatagtagtttttttattaggggttttatttgttttatttttaatttttagagttaaagggatttttgtttttattttattttttttttttttgttttttttatttgttttaagttgtggttttaggtgtatttttgttaggttatgttttattaagatgaagttgtttgggtggtgtttagtggtttttgtgttatggttttgtgttagtggatgaaggaagtagatttatgttgttgagttaggttggagggaatttttaatgggagaattttttggaaagatgtagttttttttttttaatgttttttttttttgtgtttttttgtagagttaattgtatttttttttattaagtttttagtttttttttttttatttaatggagtaggaggggttgttgttttggggataagattgggggagtgggatatttatttttaaggttaaagaatttagttattaagggttaggatattttaattaatattttaaaaagtaaagttatgtagagtttatgttgattaaaatagtaagtttttttgtgtttgtttttttgagatagggttttattttgttgtttaggttagagggtagtggtataattttaggttattgtaatttttattttttagtttttttttttttgagatggagttttattttgttgtttaggttggagtgtaatggtgtgattttagtttattgtaatttttgttttttaggtttaagtgatttttttgttttagttttttgagtagttgggattatatgtgtttattattatattaggttaatttttttatttttagtagagatggggttttgttatgttggttaggttggttttgaagttttgattttaggtgatttgtttgttttggttttttaaagtataaggtttataggtatgagttattgtatttggttattatttttgtatttttagtagagatgaggttttgttatgttgtttagggtggtttggtttttattttttgggtttaggtgatttatttattttagttttttgaagtattggaattataggtatgagttattgtgtttagtttaaaatagtaagtttttaaagggagggtagttgtggttgttgggattattgggtgggtgttagggtaggattaggatttaatttagtggatattttattgttttgtttattatggggttttggtattgattttggttttttaggagatgtaggattatgtttgttttgttgttgagtgtttagggttttattattatttatttttgtttatagttttagggtagtttagtttttagaggtttttaggtatttatttgaagtttttgtagggttgggattgatgttttattttttttagggttagttttataggggagtatttttttttttttttttttttttttttttatttttttttttttttttattttgttttggggggaagttggggtgggattgtttagtttggggtttttttttttagttaggttttgggttttattgtttagtgtaggaagtaaagggtagggttttgggaagttatgtttttttaaaggttattagtttgggttaaaggttttagttgtaattaatggttaggttagggagttttaaagatattatagtttagtagatttttttttttaaatttttgtgggtatttttaggttggagtttagtttattttaaggtatttatgaatgttttatttttttgtatggttttttggagttgtttttatttttgtagtttatgttggtgaggggttttggtatatttgaatggggagtttttgtttggttttggtttttgttatttatttttgttgagtgtatagtggatttgggtattttatgtatatatggttttgtggttgttaaagtttagtatgatggtttgggataggtagataatggttagtgtgtggattaagtttttgtagggtaggttgggttttagtttgtagatgttttttagtgttaggttgttgtgtttttgtaggtttttgatatgttttgatttgtttttgtagattagtattagtaggtagtttgtaaggagtgtggttgttagggatgttagttaatattgtttgtttgtatttttggtgtttttggggaggttgtgatagtgtagagatttgggttggggttatgattttaagttagttatttagttatgttaaggttttgatttttggtatataaaatggggtgattttttttttttgtaagatttataggttgtaagagtggaaatgaatttagaatatttatgtttgtgtttagtttttgatgttggtttttatgattgggttttggatttttattggtggatttgttttgttttaggttttggagttttttgggttatattgagggttgtaggatttgtggttatgggtttgggggtttagtgtggggtttgtttggtggttgtggttttttgttttggttttgttagtttgtttttattttgttgttttgttagttatatttgtgtttattttttgttgttttgagatttattgttttttttggtttttttagtttttaggttgtggttgagttttagttttagggggtaggggaggttgatgggttttgggttttatttttatttatttggttattgtttagtatagtaggttttagttttttttttggttgttggggatttgtttgtgttttgttttttggattttttagggtaatttgggtttttgtttttatttttatttttttattttttaatgttattgttattataggtaattggttggtgttgtttattttattaggtgtagtttaaatttggtatagtatagtttttgtgtggttttgggtaaattatttggtttggggatatttttgtgaatggtgggggtagtaggtttgtttgagagagtagagaggatggtgtaggaagatttttggtttttttggtatggttttaggtttgatgattaggtttttttttatttaggttttggtagttgggttttaggatatttggttttggtgagggtgtaggttttgggattttatataaatattttaaatttttgtgagtatgtaggaggggattggggagaatgtttttgaagaggattgtagaatgatgtgttatttgaagttttgaaaagtaggtgtttattttttatataggttttgtaaagttatgtgagaattaaaattttaaatgaatttgatgtagatatttatttttgtaatggagtttagagtagatatggtgtttagtttttttttttagttgtgtttatttttttgggttatatggttatagtttgtagagttagggggtttgtgtgattataggggttagtggttagtaagttttttttgtaaggggttagagggtaagtatgtagtttttagggttatataggttttgtggttattatttagtattgttatttttgttgtgtgaaagtagttttagattttgtgtagatttttgggtgtagttgtatgttaggaagtttgatttataaaagtaaggtgtggtgtgggtgtggtgatagtgtgtttattttttattggaggatttgtttgtagtgtttgaaatgtttatagttagaaaaaagttaggtatttttaatttgagaaagaagtttttttatttttgtatttatagaattttgtttgtttagttgaggttttttagataattttttggttttttttggaaattttaaggtaggaagtaggatgtttggttttaagagagaaattaaatatagtggtgtaattggaatttgttgtaatagtaatgttttttaaatgtgttattagagtatttaagaaatgatggtgtgtgggaatagtatgaatatgggtggttttgtgtaggatgggggttttagggttgtttgagttggaggatagtttgtagtttttattgtttgtagttgaagtgtgttgtgagattgttgtaggggtttgggttatttttgttttgggggattttaaaaagttgagttatatttatgttgaaatttttattgaggataattatgtattatatagattatttttttattttttttttttaaggggtaaggtttttgggaatttttgttttgattttttagttgtatggttttgggattttggttttagtttttttatttgtgatttggggatagtggtatttttatttgtagtaatgttgtaaggattatttgtaggaaggtgtggaggttttgtgtgtagtaagtatttaatatatgtttgtatatttaggtatatatttgtttgtgttattagttataaggttagagtgttttttttgtaatttggttgtttatgtatagagggattaggtgatttatggtttatttttagtgtttagtaaggggtatatattggttaattatttattattttttattttgagggttttagtttttttggagttttggtgggttgattatttagaagttaggtagggatttttttttttttgtggttttgttttgtggtggtggtattttggttatattttggtagatagttttggtatttgataataattagttttttttattgtttttaattagtattttttttgtttaataagttatatttttaataatatagttaggattggggttaggagtttgtttgtaaagagtttgatgttatttttttggtttgattgagtttaaagttttttttattatatttagttggaaagtagttatagatgatatgtgtgggaatggttgtgagttaataaaattttatttataaaaataggttttggtaggatttggtttagagattatagtgagttgatttttggttaagagttgaatttgttatgatggttttttatattttttataagttagttggttttattttagatttttatttttgtaaggttggtggtggggtgtatgttgaatttatgtttgatttttagatttttttttgatttatggatgttattttttggtttgtttgatttttttggattttgtttataaatgtagatttatattttgtattttgggaatgtttgaaaatttaggagtatttataggtaggggttgagtgtggtttttagtaagatgtgtttatttttgattttggaatttgtatgtttttatttgggaatagggtttttgtatatgtaattgagtttaggattttggattgtttgaatgtagtagtaagtgtttttgtaagggggagaataggaggtgtagatatagggaaggttatttgaatggggatggaggtagggattggagtgttgaggttatagttaagggatatttgtgtttaataggagttgggagaggtaggaaggagtttttttgggaagtttggagggagtgtggttttatgggttttttgattgtagagttttaatttttaggatttagtgggtgaatttttattgtttgaaggtttagttgtggtgtttttttttgttggttataggaaattgatgattatttaaattattgattttatttttaaatatgaatagaagttgagaggttagagttgggggtttgtttgttttttttgtttggtagaagtttttttggtagttgatgtttatttttttatgtttaggttgttttttttttattattaataataaattgattttgtttttaaagtgtattttttggggagtgttagggggtaaagtgttgtaggaattggtattagagagatggaagttttaggtttagggttgagattaagttaggttaaggttgggatattagagttttaggatgtagtggttttttttgggatatagtatgtgtgttgggtagatataggtttgggggatttaggagtggatggttattggttagttttttgggtgttaggtttagagggttttagttatatttttttaggaggtttgggtatttgggagttttttatttagtggttgaggaagtattattggttttgtttatttattttttggttgggggttttttgtttggtggttgaggaattattattagttttgtttatttattttttggttgtgggtattggttgtaatttggttagggaaggtttttgtagaatttggagggtttttggggttttggtaggtagtattgggttgggtggagggtattgggttgtgatgttgaaaggagataaatgaggaagaggtattaggagaggttaaggtatagagatt

SEQ ID NO: 315 - DNA, 2031 bp, Artificial Sequence
  chemically treated genomic DNA (Homo sapiens)
ttttattggatgttattgtatatgtgttttgtttgtagttgatgatgtagttatagggtaagtgggtttagtgtttggataagataaatattggggttatagtggtggttagtagggtaagtagaaagttgaatgtttttaagggaaggttttgaaattttatgatgttttggattattatgtgtatttgtaagggtaagagaattttagatttaatttaaaattatattttgtattttttaagttttttttttatgtatgttgttttagttttttttttagtttttttttttgatggatagtggggatttttgttatggagttggttttttgtttttggtgatgggtttttgggaatggtggggtatatttttagggttgggaggggttttagtttttgagtgttggatttgtgtttgttgtttatttaagattttattagaaaggtatagtttataatgtgggggatgttagttaggaaataggtgtttgtgaaatttgtatttgattttttgaatggtttttgttgtttttttggatttttatttttgtttatgtgtgtttgttatagtggggtgttattttgttattttttaattggtttttttttggaaggaggaataaaagtttgttttgttttttgttttttttttttataattgatttttttttttttttattttgttttgttggagatgggtgttgttttttttaggtgggaatggaatggtgagaaagggatgatagaaggttgtggggaaaaaattttttaattttttttttttttttttgaatattttttgattttgttgtgtgagataatatttttggttattattgatatggaaaattaagttgtttgtgatggaaagtgatttttatgtttttgatttttgaaaggagaagtatttagtagtaaaggttttgtagttaattagttttgttttgaattgtttttttttaagtgtatgtttaaaatttagtgagatatatttggaagtggattttattgtgtgttttttggtgattttttaaattggtgatgttggttttaatatttatttatattgtttggtatatatatttgtgttttgtgagtaattgtatttttattattatgggtagttaaaggatgatttttgtaagtgttaggattaaagtgaagtgtttttgtgttatgtttatggtgaagtttttggtgttatagagagttttttggtttttatgtttgtaggttttagttttagtggtagtgggtgtatttggtttgaatatggtgttggagtttggagagtattttttagagtgttgtagatttgggtttggagtattttttggggatagggaaattattttttttgtagtaggaggggttttaggaattgaagttttatgggaaattttttggtagttggagtggagttttggtggtttttttgaatatagtaattggtgagtgagtgggattgagaggtttatgaggagtttgaaggttaaagtgtatatgatagagaggaatagtatgtaggagttggagtagtttattaggtagttttagggtgtgtgtatgaaggtgttttagttgtatagtgggagtgttgagagtagtagattggttgtttatatggttagtattatgttgagtatttggtttgattttttggaggttgtttggttttttatatttttgtgtattgtataaaagttgtaagagattaggagagttgtttttaagttgttagagaggttttggtataaatatattaaggtagaggtggtgtatagaaattggaagtaattggggattttgtttggttattgtaaaaatatgaagatggttattgataggatgtttatgagattatttatagattaggaagttataagtatggatataatagttttgttttgtatttttagtagggaaattagtgaataaatgttgtttattaaggttgtaaaagttatgagatatgttaagtaaaaaagatagatatttagggtttttggtggatttaaaaggtttgtaga

SEQ ID NO: 316 - DNA, 2031 bp, Artificial Sequence
  chemically treated genomic DNA (Homo sapiens)
tttatggattttttaaatttgttaggaattttgaatatttattttttttgtttgatatgttttatgatttttgtagttttggtgggtagtatttatttattaatttttttgttgaaaatgtagaatagaattgttgtgtttatgtttgtggttttttggtttgtggatgattttatgagtgttttgttggtgattatttttatgtttttgtagtggttaaatgaggtttttggttatttttaatttttgtgtattatttttgttttaatgtatttatgttagggtttttttagtaatttgaaggtgatttttttagttttttataatttttatatgatgtatagaggtgtggggagttagatagtttttagaagattgggttaggtgtttggtgtggtgttgattgtgtgggtagttagtttgttgtttttggtgtttttgttgtgtggttggggtgtttttgtgtgtatgttttggggttgtttggtggattgttttagtttttatgtattatttttttttattgtgtatgttttggtttttggattttttgtgggttttttagttttatttatttattgattgttgtgtttggaggagttgttgagattttattttaattattaggaaattttttgtggagttttaatttttgggattttttttattgtggggagagtggtttttttgtttttagaggatgttttaggtttgagtttgtggtgttttgggggatgttttttgagttttgatattgtgtttggattgggtgtgtttgttgttgttggggttgaagtttgtaggtgtgagaattgggggattttttatggtattaggagttttattgtgagtgtagtgtagaagtgttttgttttgattttagtgtttataaaagttgttttttggttgtttatgatggtaaaagtgtagttgtttataaagtgtgagtgtgtgtgttagatagtgtaaatgagtgttgggattggtgttgttggtttggggagttattaagagatatatagtgaagtttgtttttaagtgtattttgttgggttttagatatgtatttagaagaaggtagtttgggatagggttagttggttgtgaaatttttattattaaatgtttttttttttaaaagttaggggtatggggattgttttttgttgtgagtgatttagttttttatattggtggtggttaaggatattgttttatatagtaaaattagagagtatttagaaaaggaaagagggaattaaaaggttttttttttataattttttgttattttttttttgttgttttatttttgtttagagaggatgatgtttatttttagtagggtgggatagaggggaggagagattagttgtggagggagaagatagggaataaaataggtttttgtttttttttttaggaggaagttgattaagaggtggtagagtggtgttttattgtgatgagtgtgtatgggtggaggtgagggtttagggaggtgataaaggttatttggagaattagatgtgggttttatggatgtttgttttttagttagtgttttttatgttgtagattgtgtttttttggtggagttttgaataggtagtgggtgtagatttggtatttaaaagttgaaattttttttaattttgggggtgtgttttgttgtttttaggagtttattattaaggatagggagttagttttgtagtagaggtttttgttgtttattaggagaaggaattggaaagggaattgaggtagtgtgtgtggagaaaaggtttgagaagtataaagtataattttaggttaggtttgaagtttttttgtttttgtagatgtatatggtggtttagaatgttgtggggttttagagtttttttttggagatatttagttttttatttattttgttggttattattgtaattttagtgtttgttttgtttaaatgttggatttatttgttttgtggttgtattattaattgtaggtagaatgtatatgtagtggtgtttgatggga

SEQ ID NO: 317 - DNA, 2237 bp, Artificial Sequence
  chemically treated genomic DNA (Homo sapiens)
gtttgtgatagatgtttgtaggtatatggtaaggaaaatagattaaaatattaagaaatagtaagaggttggattgagggttttttatttgtatgggaaattttattttgtttattatttttagaaataaaaaggaaaatgattttaaagatataggttaaaggttgaaggggtgtagaattattttttgtttttttttttttattttttttaaatattttagaatgagttaaattttttgaattttgtagtatagataataagtaatttagtaagattggatggggatgattgagggttaatttattataggattataggaaattttttagttttaaatttgaatgtatttgtgattatggtaatattttttatttgattaaaagttattaaatgttttgataagtgtttatagttgtttttttgattattgaagtggttttgaaaagagtttttggggttaggtggttgatttattgtgttttttgtatatttttattttgagttggtgtatttggtgattgttttggtgtttttggatatggtgtgtttggttagtttgttgggtagtagtaggtgtatggttgtttggattttgtgggatgtgatggtggagtgtttgttgtagtgtgttaggtgggatgttttttttgtgatgtgtttgaagatgttgttgatgaaggagtttatgatgtttatggttttggatgagatgttggtgttggggtggatttgttttagtattttgtatatgtaaatggagtagttttttttgtggttgtgtttgtgttttttgttgttttttttttgtatttttgtaatagtttttttggagttttttttgggagtaggagtggattttgttggatttggtatttttgtgtgaaaaaagagaaaagagatttaaagaagtaatttgaattattgtaaaatgggttggttatgtgttatttatagagtttgtatgtaaatgaagatttgtaaagtgttgtgtttttattggttaatttataatggtgttgttagagggggtggagtttatgtaaataatagattttagttttgtttttttaatggttattgtaataaaagttttgttattttattagaatggtttattttatattaattagttttaagttaggtgaagtgatagtttttatggtttggggtttttttttggtttttattttttattagatttgtatatggaagaaattttaatgttagttagataagttaatttttttgttttgtttttgtatttttattttatattttgtggaaattttttttttttttttgaaatattattttatttatttttaaaaattgttagatatttatttttgtttgtttaaattattattttggtttggatattgtttgtagtatgtaatgaggaagatgttgagttttaattaagtttatagtttttaaataaattaggaaatgggtttataatttttaagggatttgttttatttttatatttaggattttttatatttagaaattttttatagttttttgtttttatgtaaaattttatttatagaattgggagttggatttttagttttaaattagtgtgaaaatgtttggttggaattataaggattatgtttttgtggttttttttattgttggttaatttatggttgggttttgggttttgtaatgttatttattatgagtgtttttggtttttgattgttgtgtaaggtagatgtatattagatggagagttggtatagttgtttttgatgaaaatggtagtggttttgaaaagagtttttagattgattatttaaaaatatgttttaggtttgttttttgtggatgtggtgggttaattggatgtttttgggtatgatggttatgtgtttggtatggatggtgtataggtttgtgtttttgaatagttttattaggtaggttttgttggttttttgtagtgttattatggttgagttttggaagtgtaggtttgttttaaagttttgtgtgattttgtgtattagttgttggaagggtagtttgtggattagtagttttgtagatttttggtagtgttggattttttgtagagttatggtgttgggttggtagtggtgtggtttttttattttgtttgtggttggtgtgtttttgtgggttgttttggtagttagttgtttttttggggttttgttgttggttgatttgtgggtagtttgtttagtatgggttatgtt

SEQ ID NO: 318 - DNA, 2237 bp, Artificial Sequence
  chemically treated genomic DNA (Homo sapiens)
agtatggtttgtattaagtagattgtttgtaagttgattggtggtaaggttttgaggaagtagttggttattaaagtggtttgtaagagtgtgttggttatgggtggggtgaagaagttgtattgttattggtttggtattgtggttttgtgggagatttggtgttattagaagtttatggagttgttgatttgtaagttgtttttttagtggttggtatgtgagattgtgtaggattttaagatggatttgtgtttttagagtttggttgtgatggtgttgtaggaggttagtgaggtttatttggtggggttgtttgaagatatgaatttgtgtgttatttatgttaagtgtgtgattattatgtttaaggatatttagttggtttgttgtatttgtggggagtgggtttaaggtatatttttaagtggttgatttaaaggttttttttagagttattgttgtttttattaagagtagttgtattggttttttatttgatgtgtgtttgttttgtgtagtggttaggggttaggggtatttgtggtgggtgatgttatagaatttaaagtttagttgtgagttggttggtagtagagaaagttgtagaggtatggtttttgtggttttggttgagtgtttttatgttggtttaaggttagaggtttggtttttaattttgtgggtaaagttttgtatgggggtaagagattatggggagtttttagatgtggaagattttgagtgtaagggtggggtgagttttttaaaaattataaatttgttttttggtttatttaggaattataagtttaattaaagtttagtattttttttattgtatattataggtggtgtttaagttagaatagtaatttaagtgggtgggagtaaatatttggtgatttttaaaaatgggtgaggtagtattttaaggaagagaaaaaaatttttataaagtatagaataaaaatgtaaaaatgaggtaagagagttaatttgtttagttggtgttaagattttttttgtatgtaagtttaatggaaagtgaaaattaagaaaaaattttaagttgtagaaattattgttttatttagtttaaaattggttagtgtgaaatggattattttgataggataataagatttttgttatagtgattattaaggaagtaagattagaatttattatttatatagattttattttttttgatgatattgttgtaagttaattaatgaaagtgtagtattttgtgagtttttatttgtatatgggttttataagtagtgtataattagtttgttttgtggtagtttggattatttttttaagttttttttttttttttttgtgtaaaaatgttggatttagtgaaatttgtttttgtttttaagaagggttttaaaaaggttgttatgaaagtgtagaagaaggatggtaagaagtgtaagtgtagttgtaaggagagttattttgtttatgtgtataaggtgttgaagtaggtttattttgatattggtattttgtttaaggttatgggtattatgaatttttttgttaatgatatttttgagtgtattgtgggagaggtgttttgtttggtgtattataataagtgttttattattatattttgtgagatttagatggttgtgtgtttgttgttgtttggtgagttggttaagtatgttgtgtttgagggtattaaggtggttattaagtatattagtttgaagtaagagtgtgtaagggatgtaatagattaattatttaattttaaaggttttttttagagttattttagtaattgagaaagtagttgtaaatatttgttagagtgtttgatagtttttggttaggtagggagtgttattatggttatggatgtatttgggtttaggattaaggagttttttgtagttttgtaatgagttggtttttagttatttttgtttagttttattgagttgtttgttatttgtgttatgagatttgaaaggtttgatttgttttgggatatttgggagggatggagggaaggaggtggggggtggttttatatttttttggtttttaatttgtatttttaaagttgtttttttttttgtttttgaaagtaatgaatgagatgagattttttatatagatgagaaatttttggtttgattttttattattttttagtgttttaatttgttttttttattatatatttataggtgtttgttataaat

SEQ ID NO: 319 - DNA, 4182 bp, Artificial Sequence
  chemically treated genomic DNA (Homo sapiens)
agattttttgaatgtttgatgaaatggatttttgtgaaaattaatagtgaatatttattgttgtattgtatgaagtttttgaaatgtaattaaaagtttttattgagtttttgagttttggtttgtgtgtatttttttggttgtggatattttattgtgtagagttttgtttttttgttgtttttagtttttgatgatttttttgtttttgttttgtttggtgatagatgttttattgtttttaattggaggtattttttgtgggagtggttaattgggagttttggtaggtggggaggttgggttagttagatttggaggtttaattttaatatggttgaagtaagtagtgttaatttaggtagtggttgtgaggaaaaaaggtatgaggggttgtttttggaatttgtgttatttggtattattattttgagggtgaagttttttgatattatggtggatatttttttttagaagttggttgttgttggtaggtaaagtggatgtagttgtggtgggagtgtttgttggtattgaagtttaaattttgtgaggttaggatggttgtaggttggtgtgtggtgatgtgggtttgtgttgggggtggggtagttggatgaggtgatttagttaaattttgagttttaggagttagggtatttatgtattgataatttgtagtggattgggatagttagttatttttttttataggaagttttgtttttattaaaattttaggtggttgggaggaaagatagagtttttgtaaattagagtagggttttttatttttttattatttttgagatagggttttgtgttgttgtttaggttggagtgtagtggtgtgattattgtagatttgattttttgggtttaagtgatttttttgttgtagttttttaagtagttgggattataggtttgtgtttttgtgtttggttatagattagggtttaagttgtggtttattattatgtgagtaagatgtaagtttttttttttttgttggttttttgttagttaagtgatagtaatagtattttttttatagggttgttttgagaattaaatgagtaaatatatttaaggtgtttaggataggatttgatatatagaaagatttgttagttattatgagaatattttttttattgggagattgttaggattaaatgtgttattatgaaaagaaatattttttttgttttgatttttattttatttatttttatttttattttttgagatggagttttgttttgttgtttaggttggagtagtggtgtgattttggtttattgtaatttttgttttttgggtttaaaggatttttttgttttagttttttaagtagttgggattataggtgtatattattatatttggttaattttttgtatttgtattagtagagatgaggttttattatgttggttaggttggtttggaatttttgattttgtgatttatttattttggttttttaaagtattaggattataggtgtgagttattgtgtttggtttttatttttatataatttatatgatttgagagttttgtttatgattttattattttagtatattagtgttgaaatgtttttaggagtttggtgttttgattatagtttttttttttttagttttttttatttttatttttttgttttttggttttattaggatttttatttgtttttagtttattttttttgggtttagtattttattttttttatgtataattaatgatttgtttttatttatgatttattaaatatttgagtgttagttggggatattatgaggtagataaggttttttgtttttttggagtttgtatttaatgtgtagagatgttaataatattattatataggttggtaagatagtaaggttattattatgtgttaatagtgatttatgtttgtaatttttgtgttttgggaggttgaggtaggaggattatttgagtttggaagtttgaggttttggtgagttataatagttttattgtattttagtttaggtgatagagtaagattttgtttttaaaaaagaaaaaaaaaaaagataatgaataggtaatgatattattagataggatgtttggggtgtttattttgagatggtattttagttggaatttgaaggatgagaaggaattagattattattattattattattattattttttttttttaggtagtgtttagttttgttgtttaggttggagtgtagtggtttgattttggtttattgtagtttttatttgttgggtttaagtgattttttttttttagttttttgagtagttgagattataggtgtttgttattatggttagttaatttttgtattttttagtagagatagggttttattatgttggttaggttggttttgaattgagtttaagtgatttatttatttttgttttttaaagtgttgggattataggtatgagttattgtatttaggtggaattatttttttgaagaattatagaatgaatgtataggaaaaggggatagtttgtgtaaagtttttgaggtgattagatattttaggaattggtagagatttttttggttatagtatagtgattagagtaaaatgagatgaggttggagaggtaggtaatagttttattatgtagggtttagtttgttataataatgaatttgataaaataatttgtaattatttttatgaattaattatggtatgttattattatatgttttggtatggttttttttttgttgtatttatttttttttatttatttttgtttttgtttttttttttatagtttttatttttttttagttatatgtttttttatttatttatttatttatttatttttattttttttagagatgaggttttgttgtgttgtttaagttgattttaagttttgaggtttaagtgatttttttattttagttttttagagtgttaggattataggtatgagttatagtgtttgttttatttatttatttatgagatagggttttgttttgttgtttaggttggagtgtaatggtataatttaggtttattgtaatttttgttttttgggtttaagtgatttttttgttttagttttttgagtggttgggattataggtatgtattattatgtttagttaatttttgtatttttagtagagatggggttttgttatgttggttaggttggtgttgaatttttgattttaggtgatttgtttgttttggttatttatttataatataaatatttattgattattgatagtgttaataaatttgttttagttttagtagggttttagttgttggagataaggtagtgattaagatggataaggttttaatttttttggagtagatattttggtattattaaaaaaaaataaaattgagtttggtgtagtggtttatatttgtaattttagtattttgagaggtagaggtgggtggattatttgaggttagaagtttgagattagtttggttaatgtagtgaaattttatttttattataaatataaaaattagttgggtttagtggtgtatgtttgtaattttagttatttgggaggttgaagtaggagaattgtttgaatttgggaagtggaggttttagtgagttaagattttattattgtattttagtttgggtaatagagtgagattttattttaaaaaaataaataaaataaaataaaattagtgtaaaggaatagagagtagttgatatgttgttttttggtgatttgttgttggagaggttgggattttggatgtgtgtggggttttggtttattggtgatttggttagttggttgtgtttttgtttgagttgtttgttggggtttgtgggtttgttgattttttgtgtgtttgagtgttttgatttttggtgttggtttgggtttgggtttttgatttatttgggggtggtggggaaggtggtgagggttattttgtttttgtgtgttttttgttgtgggtgtttggggtggttgtgataattttattttattggttttgtgttgtgtgtgttaggtgtttttgtttttgttgggttgtttgttgttttttttttggagtggggagttggttagggttgattgatttgttggttggttggtttgtttttgtttttggggggttt

SEQ ID NO: 320 - DNA, 4182 bp, Artificial Sequence
  chemically treated genomic DNA (Homo sapiens)
gagttttttgggagtggaggtgggttggttggttagtgagttgattggttttggttaattttttattttggggaaggggtggtggataatttagtggagatgagaatgtttgatatgtatggtatggagttagtggggtggggttgttgtggttgttttgggtgtttgtagtggagagtgtatgggggtagggtagtttttgttgttttttttgttgtttttgggtgggttagagatttggatttgggttggtattgggagttgggatgtttggatgtgtgagagattagtaggtttgtgggttttagtaggtggtttaagtaggagtatggttggttagttgggttattggtaggttagagttttgtatgtatttagagttttaatttttttagtgataggttgttagaggatagtgtgttagttgttttttatttttttatattgattttattttattttatttatttttttgagatagagttttattttgttgtttaggttagaatgtaatggtgggattttggtttattgaaatttttgttttttaggtttaagtgatttttttgttttagttttttgagtagttgggattataggtatgtgttattaggtttggttaatttttatatttgtagtagagatggggttttgttatattggttaggttggttttgaatttttgattttaagtgatttatttgtttttgttttttaaagtgttgggattataggtgtgagttattgtgttaggtttaattttatttttttttaatggtattagaatgtttattttaagaagattggaattttgtttattttgattattgttttatttttagtaattagaattttattagaattagaataaatttattgatattgttaatggttagtaaatatttgtgttataaataagtggttgaggtaggtggattatttgaggttaggagtttaatattagtttggttaatatggtaaaattttatttttattaaaaatatgaaaattagttgggtatggtggtgtatgtttgtaattttagttatttgggaggttgagataggagaattgtttgaatttaagaggtaggggttgtagtgagtttagattgtgttattatattttaatttgagtaatagagtaagattttgttttataaataaataaatgggatgggtattgtggtttatgtttgtaattttagtattttgggaggttgaggtgggaggattatttgagttttagagtttgagattagtttgggtaatatagtaagattttatttttaaaagaaataaaaataaataaataaataaataaatggggggatatataattaagagaaagtggggattatgggaggggagataagggtaagaatgagtagggaaaaataaatataataggggagggattgtgttaggatatatgatgatgatgtgttatgattggtttataaaagtgattataaattattttattaaatttattattatggtaaattaggttttgtatgataaggttgttatttgtttttttagttttattttattttattttgattattatgttgtagttaagaaggtttttgttagtttttggaatatttgattattttagggattttgtataggttgttttttttttttatatatttgttttgtaattttttaaaaaggtggttttgtttgggtgtagtggtttatgtttgtaattttagtattttgggaggtagaggtgagtggattgtttgagtttagtttgagattagtttggttaatatggtgaaattttgtttttattaaaaaatataaaaattagttggttgtggtagtaggtatttgtaattttaattatttgggaggttgagggaggagaattatttgaatttggtaggtggagattatagtgagttgagattgagttattgtattttagtttgggtaatagagttagatattgtttaaaaaaaaaaaataataataataataataataataatttggtttttttttattttttaagttttagttgaaatgttattttagaatgggtgttttaagtattttatttagtggtattattatttgtttattatttttttttttttttttttttagaggtagggttttgttttgttatttaggttggagtgtaatggggttgttataatttattgaagttttaaatttttaggtttaaatgatttttttgttttagttttttaaagtatggggattataggtatgagttattgttgatatataataatggttttattattttattagtttatgtgatgatgttgttggtgtttttatgtattgaatgtaagttttaaaaagataagaggttttgtttgttttatggtatttttagttgatatttaaatatttgatgagttatgagtgaagataaattattaattatgtgtaggaaaggtaaagtgttgaatttaggaggaatggattgggaatagatgagagttttgatgaagttaaagaatagggaagtggggatagagagggttagagaaggagaggttgtggttagggtattgaatttttggaagtgttttaatattgatgtgttggggtggtgggattatgggtaaaatttttgagttatataaattatataaaagtgaaggttgggtgtggtggtttatgtttgtaattttggtattttgggaggttgaggtgggtggattatgaggttaggagttttagattagtttggttaatatggtgaaattttgtttttattagtatagatataaaaaattagttgggtgtggtagtgtgtatttgtaattttagttatttgggaggttgaggtaggggaattttttgaatttgggagatggaggttgtaatgagttaagattgtgttattgttttagtttgggtgataggatgagattttgttttaaaaaataaaaataaaaataaataaaataaaagttgagataggaaaaatgtttttttttatggtaatatatttagttttggtaattttttagtgaagaagatatttttataatagttaataaatttttttatgtgttaggttttgttttaggtgttttaggtgtatttatttatttaatttttaaaatgattttatgagaaaggtattattgttgttatttgattgataagaagttgatgagggagagggggtttatgttttgtttatatagtggtgggttgtgatttaaattttgatttgtagttgggtgtgggagtatgagtttgtagttttggttatttgggaagttgtggtaggaagattgtttgagtttaggaggttgagtttgtagtgattatgttattgtattttagtttgggtgataatgtaaggttttattttaaagataataaaaaaataaaaaattttgttttaatttgtaaaggttttatttttttttttaattatttgaaattttagtgaaaatggggttttttgtaggaaggagtagttagttattttggtttgttataggttattagtgtgtgaatattttgatttttaaggtttaggatttgattgggttgttttgtttgattgttttgtttttaatgtggatttatgttattgtgtgttagtttgtggttgttttgattttgtgggatttgagttttggtgttaataaatatttttattgtggttgtgtttattttatttgttggtggtgattagtttttgaagaaaagtgtttattatggtgttgaggagttttatttttgaaatggtagtgttgggtggtatagattttgaagatgattttttatgttttttttttttatagttgttgtttagattggtgttatttgttttggttatgttgaagttgaatttttaaatttaattggtttggtttttttgtttgttggagtttttgattggttgtttttgtgaagggtgtttttgattggaagtagtagaatgtttgttattgagtagggtgggggtggggaagttattggaggttgagggtagtggggaggtgaggttttgtgtggtgggatgtttgtgattggaaaaatatgtgtaagttaaagtttgggggtttaataaaaatttttaattatattttagagattttgtatagtgtaatagtgaatatttattgttaatttttataagagtttattttattaaatgtttagagagttt

SEQ ID NO: 321 - DNA, 20 bp, Artificial Sequence
  Detection primer for CCND2
tttggagggatagaatgtga

SEQ ID NO: 322 - DNA, 23 bp, Artificial Sequence
  Detection primer for CCND2
aaaaacaaccttaactcaaacat

SEQ ID NO: 323 - DNA, 27 bp, Artificial Sequence
  Detection primer for CDKN2A
agattattagtttttatttgagggatt

SEQ ID NO: 324 - DNA, 21 bp, Artificial Sequence
  Detection primer for CDKN2A
ccaccctaactctaaccattc

SEQ ID NO: 325 - DNA, 20 bp, Artificial Sequence
  Detection primer for CD44
tttttgtttgggtgtgtttt

SEQ ID NO: 326 - DNA, 19 bp, Artificial Sequence
  Detection primer for CD44
cacttaactccaatccccc

SEQ ID NO: 327 - DNA, 22 bp, Artificial Sequence
  Detection primer for EDNRB1
gaagggatgaatgaataaaagt

SEQ ID NO: 328 - DNA, 22 bp, Artificial Sequence
  Detection primer for EDNRB1
caaaaacttctcaaatcaacaa

SEQ ID NO: 329 - DNA, 22 bp, Artificial Sequence
  Detection primer for ELK1
atatgggattgatggaagatag

SEQ ID NO: 330 - DNA, 23 bp, Artificial Sequence
  Detection primer for ELK1
tccaataaacacaaacctaaatc

SEQ ID NO: 331 - DNA, 24 bp, Artificial Sequence
  Detection primer for FOS
tttttatttaggatgagggatatt

SEQ ID NO: 332 - DNA, 18 bp, Artificial Sequence
  Detection primer for FOS
actacttcccacccaacc

SEQ ID NO: 333 - DNA, 23 bp, Artificial Sequence
  Detection primer for GSTP1
ttggttttatgttgggagttttg

SEQ ID NO: 334 - DNA, 24 bp, Artificial Sequence
  Detection primer for GSTP1
ctactatctatttactccctaaac

SEQ ID NO: 335 - DNA, 22 bp, Artificial Sequence
  Detection primer for RARB
gggagtttttaagttttgtgag

SEQ ID NO: 336 - DNA, 19 bp, Artificial Sequence
  Detection primer for RARB
ttaatctttttcccaaccc

SEQ ID NO: 337 - DNA, 22 bp, Artificial Sequence
  Detection primer for PTGS2
agagggggtagtttttattttt

SEQ ID NO: 338 - DNA, 24 bp, Artificial Sequence
  Detection primer for PTGS2
aacatatcaacctttcttaacctt

SEQ ID NO: 339 - DNA, 22 bp, Artificial Sequence
  Detection primer for RASSF1
agtgggtaggttaagtgtgttg

SEQ ID NO: 340 - DNA, 19 bp, Artificial Sequence
  Detection primer for RASSF1
ccccaaaatccaaactaaa

SEQ ID NO: 341 - DNA, 23 bp, Artificial Sequence
  Detection primer for ESR2
agttggagaaattgaaaagatta

SEQ ID NO: 342 - DNA, 22 bp, Artificial Sequence
  Detection primer for ESR2
taacaaacccaaaacctctcta

SEQ ID NO: 343 - DNA, 22 bp, Artificial Sequence
  Detection primer for DRG1
tttagttgtgaaaaagggattt

SEQ ID NO: 344 - DNA, 23 bp, Artificial Sequence
  Detection primer for DRG1
ccctataacctccacactatctc

SEQ ID NO: 345 - DNA, 21 bp, Artificial Sequence
  Detection primer for DRG1
gttttggagggagtagagatt

SEQ ID NO: 346 - DNA, 18 bp, Artificial Sequence
  Detection primer for DRG1
cccatcccacaattaaaa

SEQ ID NO: 347 - DNA, 23 bp, Artificial Sequence
  Detection primer for CMYA3
tgttttaggtttgatggattaga

SEQ ID NO: 348 - DNA, 18 bp, Artificial Sequence
  Detection primer for CMYA3
actccccaaaatcccact

SEQ ID NO: 349 - DNA, 23 bp, Artificial Sequence
  Detection primer for ONECUT2
gaagaggtgttgagaaattaaaa

SEQ ID NO: 350 - DNA, 21 bp, Artificial Sequence
  Detection primer for ONECUT2
cccaccctaacttaccataaa

SEQ ID NO: 351 - DNA, 19 bp, Artificial Sequence
  Detection primer for MX1
tgtaggagaggttgggaag

SEQ ID NO: 352 - DNA, 22 bp, Artificial Sequence
  Detection primer for MX1
ccaaacataacatccactaaaa

SEQ ID NO: 353 - DNA, 22 bp, Artificial Sequence
  Detection primer for DOCK10
gtttttaagtgttgggtgattt

SEQ ID NO: 354 - DNA, 21 bp, Artificial Sequence
  Detection primer for DOCK10
tacctcttccctctaccaaac

SEQ ID NO: 355 - DNA, 24 bp, Artificial Sequence
  Detection primer for BTG4
aagagttttaggaaatgtgttttt

SEQ ID NO: 356 - DNA, 22 bp, Artificial Sequence
  Detection primer for BTG4
ttctactcaccaaaccctctac

SEQ ID NO: 357 - DNA, 22 bp, Artificial Sequence
  Detection primer for DMRTC2
taaggtaagggaaggttagaaa

SEQ ID NO: 358 - DNA, 22 bp, Artificial Sequence
  Detection primer for DMRTC2
attaccacaacctccaataaaa

SEQ ID NO: 359 - DNA, 25 bp, Artificial Sequence
  Detection primer for GPR7
ttattattttagatggagtgaggtt

SEQ ID NO: 360 - DNA, 18 bp, Artificial Sequence
  Detection primer for GPR7
acccaaattaccccacaa

SEQ ID NO: 361 - DNA, 23 bp, Artificial Sequence
  Detection primer for FAT
agatgttttatatttgtttggga

SEQ ID NO: 362 - DNA, 21 bp, Artificial Sequence
  Detection primer for FAT
tactcaccccaatcttcacta

SEQ ID NO: 363 - DNA, 22 bp, Artificial Sequence
  Detection primer for ISL1
taaaaatggaagggaagataga

SEQ ID NO: 364 - DNA, 20 bp, Artificial Sequence
  Detection primer for ISL1
atctcccaaaaacaatcaca

SEQ ID NO: 365 - DNA, 22 bp, Artificial Sequence
  Detection primer for GPRK5
ttgtggttattttgagatggta

SEQ ID NO: 366 - DNA, 18 bp, Artificial Sequence
  Detection primer for GPRK5
ccctccccctaactaaaa

SEQ ID NO: 367 - DNA, 26 bp, Artificial Sequence
  Detection primer for SLC35F2
tttatttattaggtgaagagtttgtt

SEQ ID NO: 368 - DNA, 19 bp, Artificial Sequence
  Detection primer for SLC35F2
tcctcctaccaccctaaaa

SEQ ID NO: 369 - DNA, 21 bp, Artificial Sequence
  Detection primer for C14orf59
ttggagagatgtgttggttag

SEQ ID NO: 370 - DNA, 22 bp, Artificial Sequence
  Detection primer for C14orf59
aaaactcctcccctctataaat

SEQ ID NO: 371 - DNA, 24 bp, Artificial Sequence
  Detection primer for SNRPN
tttttagaataaaggattttaggg

SEQ ID NO: 372 - DNA, 22 bp, Artificial Sequence
  Detection primer for SNRPN
cccctctcattacaacaatact

SEQ ID NO: 373 - DNA, 24 bp, Artificial Sequence
  Detection primer for ARHGEF18
ttttaggaatgtaggatataaggg

SEQ ID NO: 374 - DNA, 20 bp, Artificial Sequence
  Detection primer for ARHGEF18
ccccacataaaaacctatcc

SEQ ID NO: 375 - DNA, 22 bp, Artificial Sequence
  Detection primer for SNX8
tagggtttgatgatgtgatttt

SEQ ID NO: 376 - DNA, 21 bp, Artificial Sequence
  Detection primer for SNX8
tccctcctaactcaacactaa

SEQ ID NO: 377 - DNA, 19 bp, Artificial Sequence
  Detection primer for FBN2
gagagggagggttaaggtt

SEQ ID NO: 378 - DNA, 22 bp, Artificial Sequence
  Detection primer for FBN2
actactacctcctttcccaaat

SEQ ID NO: 379 - DNA, 22 bp, Artificial Sequence
  Detection primer for HOXB5
gtggaaaaaggagagtaaattg

SEQ ID NO: 380 - DNA, 20 bp, Artificial Sequence
  Detection primer for HOXB5
ctcctcaattctcaccaaaa

SEQ ID NO: 381 - DNA, 20 bp, Artificial Sequence
  Detection primer for LIMK1
agggaggtttggtgtatttt

SEQ ID NO: 382 - DNA, 22 bp, Artificial Sequence
  Detection primer for LIMK1
aaaccctacttcctacaaacaa

SEQ ID NO: 383 - DNA, 22 bp, Artificial Sequence
  Detection primer for PSD/Q9H469
aaggtattatttttggggtttt

SEQ ID NO: 384 - DNA, 22 bp, Artificial Sequence
  Detection primer for PSD/Q9H469
aactatccaacctcttccactt

SEQ ID NO: 385 - DNA, 18 bp, Artificial Sequence
  Detection primer for SLC38A1
gggtgttggggagtttta

SEQ ID NO: 386 - DNA, 25 bp, Artificial Sequence
  Detection primer for SLC38A1
cttacaataactcactatcctttcc

SEQ ID NO: 387 - DNA, 25 bp, Artificial Sequence
  Detection primer for SLC38A1
agagtgtggtattagatttggtttt

SEQ ID NO: 388 - DNA, 25 bp, Artificial Sequence
  Detection primer for SLC38A1
acaaacatcctttaataatttctcc

SEQ ID NO: 389 - DNA, 20 bp, Artificial Sequence
  Detection primer for HIST1H4J
ttagttgagaaagtgggggt

SEQ ID NO: 390 - DNA, 21 bp, Artificial Sequence
  Detection primer for HIST1H4J
ctacctcaaaccaaaatcctc

SEQ ID NO: 391 - DNA, 20 bp, Artificial Sequence
  Detection primer for Q96S01
gtgagagtgggtgttgaaat

SEQ ID NO: 392 - DNA, 23 bp, Artificial Sequence
  Detection primer for Q96S01
accccaatcaactacataactaa

SEQ ID NO: 393 - DNA, 25 bp, Artificial Sequence
  Detection primer for FOXL2
attttaggtgtaagtttaaggttgt

SEQ ID NO: 394 - DNA, 18 bp, Artificial Sequence
  Detection primer for FOXL2
atctacctttccccaccc

SEQ ID NO: 395 - DNA, 22 bp, Artificial Sequence
  Detection primer for ORC4L
gttgagaggtaaggtatgaagg

SEQ ID NO: 396 - DNA, 25 bp, Artificial Sequence
  Detection primer for ORC4L
ttaattcccctctttaacctaataa

SEQ ID NO: 397 - DNA, 20 bp, Artificial Sequence
  Detection primer for ABHD9
gtgttagggtttaggggttt

SEQ ID NO: 398 - DNA, 18 bp, Artificial Sequence
  Detection primer for ABHD9
cctttccaacctcttcct

SEQ ID NO: 399 - DNA, 21 bp, Artificial Sequence
  Detection primer for CD37
tagatggggataggaagttgt

SEQ ID NO: 400 - DNA, 18 bp, Artificial Sequence
  Detection primer for CD37
cctcatcaaccaacccta

SEQ ID NO: 401 - DNA, 22 bp, Artificial Sequence
  Detection primer for GRN
ttattaggagaggggaagaagt

SEQ ID NO: 402 - DNA, 18 bp, Artificial Sequence
  Detection primer for GRN
cattccaaactaacccca

SEQ ID NO: 403 - DNA, 22 bp, Artificial Sequence
  Detection primer for EPAS1
tattggatgtttttggtaggtt

SEQ ID NO: 404 - DNA, 18 bp, Artificial Sequence
  Detection primer for EPAS1
aatcacctccctccctta

SEQ ID NO: 405 - DNA, 19 bp, Artificial Sequence
  Detection primer for NOTCH1
ggaggggtttgagtaattg

SEQ ID NO: 406 - DNA, 20 bp, Artificial Sequence
  Detection primer for NOTCH1
cccaccctaaaaactcacta

SEQ ID NO: 407 - DNA, 22 bp, Artificial Sequence
  Detection primer for MLLT3
gattaggtttggagttgttttt

SEQ ID NO: 408 - DNA, 22 bp, Artificial Sequence
  Detection primer for MLLT3
aatcacatccatctttcacttt

SEQ ID NO: 409 - DNA, 21 bp, Artificial Sequence
  Detection primer for SOLH
ggggataagtggttaatgagt

SEQ ID NO: 410 - DNA, 18 bp, Artificial Sequence
  Detection primer for SOLH
cccaactccccaaataaa

SEQ ID NO: 411 - DNA, 24 bp, Artificial Sequence
  Detection primer for SEQ ID NO: 44
atagtgtggatttttagggatatt

SEQ ID NO: 412 - DNA, 20 bp, Artificial Sequence
  Detection primer for SEQ ID NO: 44
caaaacctattcccctacct

SEQ ID NO: 413 - DNA, 25 bp, Artificial Sequence
  Detection primer for Q8N365
gtagtaaatgggttatggattttag

SEQ ID NO: 414 - DNA, 18 bp, Artificial Sequence
  Detection primer for Q8N365
ccataccacccacaaaca

SEQ ID NO: 415 - DNA, 26 bp, Artificial Sequence
  Detection primer for Q9NWV0
ttttagtagtggatttggttagtatt

SEQ ID NO: 416 - DNA, 21 bp, Artificial Sequence
  Detection primer for Q9NWV0
catctcttaaccccactttca

SEQ ID NO: 417 - DNA, 22 bp, Artificial Sequence
  Detection primer for SEQ ID NO: 47
gaggaaagaaggaggatatagg

SEQ ID NO: 418 - DNA, 21 bp, Artificial Sequence
  Detection primer for SEQ ID NO: 47
tccctctaaaaaccaaaaatc

SEQ ID NO: 419 - DNA, 21 bp, Artificial Sequence
  Detection primer for H2AFY2
gttaaaggggtattggttttt

SEQ ID NO: 420 - DNA, 25 bp, Artificial Sequence
  Detection primer for H2AFY2
tttctttttctctcacctattaaac

SEQ ID NO: 421 - DNA, 21 bp, Artificial Sequence
  Detection primer for RHOC
gtaagagggatagggaattgg

SEQ ID NO: 422 - DNA, 21 bp, Artificial Sequence
  Detection primer for RHOC
aacacccaaaccaaaataaaa

SEQ ID NO: 423 - DNA, 19 bp, Artificial Sequence
  Detection primer for NR2E1
ggagtttgtgaaaagtggg

SEQ ID NO: 424 - DNA, 26 bp, Artificial Sequence
  Detection primer for NR2E1
actcaacaaatacaataatctaaacc

SEQ ID NO: 425 - DNA, 21 bp, Artificial Sequence
  Detection primer for KBTBD6
gaaggttgaggaggagttaga

SEQ ID NO: 426 - DNA, 27 bp, Artificial Sequence
  Detection primer for KBTBD6
actataccaacaaaactacaaaataaa

SEQ ID NO: 427 - DNA, 19 bp, Artificial Sequence
  Detection primer for TRPM4
ggttggaaagtggaggatt

SEQ ID NO: 428 - DNA, 22 bp, Artificial Sequence
  Detection primer for TRPM4
ccaactctaaaaacaaaaacaa

SEQ ID NO: 429 - DNA, 21 bp, Artificial Sequence
  Detection primer for TCEB3BP1
gagttggttttgttgaggtgt

SEQ ID NO: 430 - DNA, 22 bp, Artificial Sequence
  Detection primer for TCEB3BP1
aaaataccttcccactaacctt

SEQ ID NO: 431 - DNA, 19 bp, Artificial Sequence
  Detection primer for Q8NCX8
tagtggaattatgaggggg

SEQ ID NO: 432 - DNA, 21 bp, Artificial Sequence
  Detection primer for Q8NCX8
ccaaatacacctctaccaaaa

SEQ ID NO: 433 - DNA, 20 bp, Artificial Sequence
  Detection primer for SEQ ID NO: 55
taggatttgtggttggtgtt

SEQ ID NO: 434 - DNA, 20 bp, Artificial Sequence
  Detection primer for SEQ ID NO: 55
ccttaccctcctctcctaaa

SEQ ID NO: 435 - DNA, 21 bp, Artificial Sequence
  Detection primer for SNAPC2
ggtttagggtattttaagggg

SEQ ID NO: 436 - DNA, 21 bp, Artificial Sequence
  Detection primer for SNAPC2
aaactaaatccaactcccaaa

SEQ ID NO: 437 - DNA, 19 bp, Artificial Sequence
  Detection primer for PTPRN2
ggggaggtgtttagtggtt

SEQ ID NO: 438 - DNA, 22 bp, Artificial Sequence
  Detection primer for PTPRN2
ccctctactcactttaccaaaa

SEQ ID NO: 439 - DNA, 24 bp, Artificial Sequence
  Detection primer for WDFY3
tgttggtggttatttttaattttt

SEQ ID NO: 440 - DNA, 21 bp, Artificial Sequence
  Detection primer for WDFY3
acccaattatcctttctcaac

SEQ ID NO: 441 - DNA, 22 bp, Artificial Sequence
  Detection primer for ZNF566
gaggatttgtgttaaggttttt

SEQ ID NO: 442 - DNA, 22 bp, Artificial Sequence
  Detection primer for ZNF566
ccaactccactatctaccacat

SEQ ID NO: 443 - DNA, 21 bp, Artificial Sequence
  Detection primer for Q9NP73
ggggttttaagagttggtttt

SEQ ID NO: 444 - DNA, 20 bp, Artificial Sequence
  Detection primer for Q9NP73
cctccctcactcacttacaa

SEQ ID NO: 445 - DNA, 20 bp, Artificial Sequence
  Detection primer for SEQ ID NO: 61
tggggatattggatgttttt

SEQ ID NO: 446 - DNA, 18 bp, Artificial Sequence
  Detection primer for SEQ ID NO: 61
ccttccaacctaacctcc

SEQ ID NO: 447 - DNA, 22 bp, Artificial Sequence
  Detection primer for Q86SP6
ggagttttaatttttgggattt

SEQ ID NO: 448 - DNA, 23 bp, Artificial Sequence
  Detection primer for Q86SP6
cccaacactcatttacactatct

SEQ ID NO: 449 - DNA, 16 bp, Artificial Sequence
  Detection oligonucleotide for ONECUT2
tagaggcgcgggttat

SEQ ID NO: 450 - DNA, 16 bp, Artificial Sequence
  Detection oligonucleotide for ONECUT2
tagaggtgtgggttat

SEQ ID NO: 451 - DNA, 16 bp, Artificial Sequence
  Detection oligonucleotide for ONECUT2
ttgcgattggtacgta

SEQ ID NO: 452 - DNA, 17 bp, Artificial Sequence
  Detection oligonucleotide for ONECUT2
tgtgattggtatgtagt

SEQ ID NO: 453 - DNA, 16 bp, Artificial Sequence
  Detection oligonucleotide for ONECUT2
ttttgtgcgtacggat

SEQ ID NO: 454 - DNA, 17 bp, Artificial Sequence
  Detection oligonucleotide for ONECUT2
tttttgtgtgtatggat

SEQ ID NO: 455 - DNA, 16 bp, Artificial Sequence
  Detection oligonucleotide for ONECUT2
ttaagcgggcgttgat

SEQ ID NO: 456 - DNA, 16 bp, Artificial Sequence
  Detection oligonucleotide for ONECUT2
ttaagtgggtgttgat

SEQ ID NO: 457 - DNA, 17 bp, Artificial Sequence
  Detection oligonucleotide for MX1
gttacgagtttattcga

SEQ ID NO: 458 - DNA, 19 bp, Artificial Sequence
  Detection oligonucleotide for MX1
ggttatgagtttatttgaa

SEQ ID NO: 459 - DNA, 16 bp, Artificial Sequence
  Detection oligonucleotide for MX1
aacgcgcgaaagtaaa

SEQ ID NO: 460 - DNA, 16 bp, Artificial Sequence
  Detection oligonucleotide for MX1
ttgggaatgtgtgaaa

SEQ ID NO: 461 - DNA, 16 bp, Artificial Sequence
  Detection oligonucleotide for MX1
gagttttcgtcgattt

SEQ ID NO: 462 - DNA, 17 bp, Artificial Sequence
  Detection oligonucleotide for MX1
aggagtttttgttgatt

SEQ ID NO: 463 - DNA, 16 bp, Artificial Sequence
  Detection oligonucleotide for MX1
tatgcgcgggaagatt

SEQ ID NO: 464 - DNA, 16 bp, Artificial Sequence
  Detection oligonucleotide for MX1
gtatgtgtgggaagat

SEQ ID NO: 465 - DNA, 16 bp, Artificial Sequence
  Detection oligonucleotide for DOCK10
gatcggaattcgggtt

SEQ ID NO: 466 - DNA, 16 bp, Artificial Sequence
  Detection oligonucleotide for DOCK10
attggaatttgggttg

SEQ ID NO: 467 - DNA, 16 bp, Artificial Sequence
  Detection oligonucleotide for DOCK10
tagtagtcgcgttttt

SEQ ID NO: 468 - DNA, 17 bp, Artificial Sequence
  Detection oligonucleotide for DOCK10
agtagttgtgtttttgg

SEQ ID NO: 469 - DNA, 16 bp, Artificial Sequence
  Detection oligonucleotide for DOCK10
attttcgcgggaagtt

SEQ ID NO: 470 - DNA, 16 bp, Artificial Sequence
  Detection oligonucleotide for DOCK10
gtgatttttgtgggaa

SEQ ID NO: 471 - DNA, 16 bp, Artificial Sequence
  Detection oligonucleotide for BTG4
agttagcgtttgtcgg

SEQ ID NO: 472 - DNA, 17 bp, Artificial Sequence
  Detection oligonucleotide for BTG4
tagttagtgtttgttgg

SEQ ID NO: 473 - DNA, 16 bp, Artificial Sequence
  Detection oligonucleotide for BTG4
ttcggcgtcgatgtat

SEQ ID NO: 474 - DNA, 17 bp, Artificial Sequence
  Detection oligonucleotide for BTG4
tttggtgttgatgtatt

SEQ ID NO: 475 - DNA, 16 bp, Artificial Sequence
  Detection oligonucleotide for DMRTC2
gggtattcgacgtttt

SEQ ID NO: 476 - DNA, 17 bp, Artificial Sequence
  Detection oligonucleotide for DMRTC2
aggggtatttgatgttt

SEQ ID NO: 477 - DNA, 16 bp, Artificial Sequence
  Detection oligonucleotide for DMRTC2
attcgaagcgttattg

SEQ ID NO: 478 - DNA, 17 bp, Artificial Sequence
  Detection oligonucleotide for DMRTC2
tttgaagtgttattggt

SEQ ID NO: 479 - DNA, 16 bp, Artificial Sequence
  Detection oligonucleotide for DMRTC2
aaatcgtattggtcgt

SEQ ID NO: 480 - DNA, 18 bp, Artificial Sequence
  Detection oligonucleotide for DMRTC2
aaattgtattggttgttt

SEQ ID NO: 481 - DNA, 18 bp, Artificial Sequence
  Detection oligonucleotide for DMRTC2
aattcgtgtatagatcgg

SEQ ID NO: 482 - DNA, 18 bp, Artificial Sequence
  Detection oligonucleotide for DMRTC2
atttgtgtatagattggg

SEQ ID NO: 483 - DNA, 16 bp, Artificial Sequence
  Detection oligonucleotide for DMRTC2
aaaagtagcgcgagtt

SEQ ID NO: 484 - DNA, 16 bp, Artificial Sequence
  Detection oligonucleotide for DMRTC2
agtagtgtgagtttgg

SEQ ID NO: 485 - DNA, 16 bp, Artificial Sequence
  Detection oligonucleotide for GPR7
gaacgtagtcgcggtt

SEQ ID NO: 486 - DNA, 16 bp, Artificial Sequence
  Detection oligonucleotide for GPR7
ggaatgtagttgtggt

SEQ ID NO: 487 - DNA, 16 bp, Artificial Sequence
  Detection oligonucleotide for GPR7
attttggcgaattcgg

SEQ ID NO: 488 - DNA, 16 bp, Artificial Sequence
  Detection oligonucleotide for GPR7
tggtgaatttggggga

SEQ ID NO: 489 - DNA, 16 bp, Artificial Sequence
  Detection oligonucleotide for GPR7
ttagtcggtaggcgtt

SEQ ID NO: 490 - DNA, 17 bp, Artificial Sequence
  Detection oligonucleotide for GPR7
atttagttggtaggtgt

SEQ ID NO: 491 - DNA, 16 bp, Artificial Sequence
  Detection oligonucleotide for GPR7
ttttcgtagtcggcgg

SEQ ID NO: 492 - DNA, 17 bp, Artificial Sequence
  Detection oligonucleotide for GPR7
ttttttgtagttggtgg

SEQ ID NO: 493 - DNA, 18 bp, Artificial Sequence
  Detection oligonucleotide for FAT
taagcgttaatagaacga

SEQ ID NO: 494 - DNA, 19 bp, Artificial Sequence
  Detection oligonucleotide for FAT
agtgttaatagaatgaaat

SEQ ID NO: 495 - DNA, 17 bp, Artificial Sequence
  Detection oligonucleotide for FAT
ttgtatttcgtcgttat

SEQ ID NO: 496 - DNA, 18 bp, Artificial Sequence
  Detection oligonucleotide for FAT
ttttgttgttataggagt

SEQ ID NO: 497 - DNA, 16 bp, Artificial Sequence
  Detection oligonucleotide for FAT
ataggagtcgtcgaga

SEQ ID NO: 498 - DNA, 17 bp, Artificial Sequence
  Detection oligonucleotide for FAT
ataggagttgttgagag

SEQ ID NO: 499 - DNA, 16 bp, Artificial Sequence
  Detection oligonucleotide for ISL1
ttaatgcggtcggtta

SEQ ID NO: 500 - DNA, 16 bp, Artificial Sequence
  Detection oligonucleotide for ISL1
agttaatgtggttggt

SEQ ID NO: 501 - DNA, 16 bp, Artificial Sequence
  Detection oligonucleotide for GPRK5
tttgattcgcggtcgg

SEQ ID NO: 502 - DNA, 17 bp, Artificial Sequence
  Detection oligonucleotide for GPRK5
atttgatttgtggttgg

SEQ ID NO: 503 - DNA, 16 bp, Artificial Sequence
  Detection oligonucleotide for GPRK5
tatcgtcggtcgagtt

SEQ ID NO: 504 - DNA, 17 bp, Artificial Sequence
  Detection oligonucleotide for GPRK5
tttattgttggttgagt

SEQ ID NO: 505 - DNA, 16 bp, Artificial Sequence
  Detection oligonucleotide for GPRK5
atgtcgagagttcgta

SEQ ID NO: 506 - DNA, 17 bp, Artificial Sequence
  Detection oligonucleotide for GPRK5
gttgagagtttgtatgt

SEQ ID NO: 507 - DNA, 16 bp, Artificial Sequence
  Detection oligonucleotide for SLC35F2
tttcggcgtttaaaat

SEQ ID NO: 508 - DNA, 19 bp, Artificial Sequence
  Detection oligonucleotide for SLC35F2
tttttggtgtttaaaattt

SEQ ID NO: 509 - DNA, 16 bp, Artificial Sequence
  Detection oligonucleotide for SLC35F2
attttcgaagtgtcgg

SEQ ID NO: 510 - DNA, 16 bp, Artificial Sequence
  Detection oligonucleotide for SLC35F2
tttgaagtgttgggtt

SEQ ID NO: 511 - DNA, 16 bp, Artificial Sequence
  Detection oligonucleotide for SLC35F2
tttcggaagacgggag

SEQ ID NO: 512 - DNA, 16 bp, Artificial Sequence
  Detection oligonucleotide for SLC35F2
ttttggaagatgggag

SEQ ID NO: 513 - DNA, 16 bp, Artificial Sequence
  Detection oligonucleotide for SLC35F2
aattcggtcgtcgttt

SEQ ID NO: 514 - DNA, 17 bp, Artificial Sequence
  Detection oligonucleotide for SLC35F2
agaatttggttgttgtt

SEQ ID NO: 515 - DNA, 16 bp, Artificial Sequence
  Detection oligonucleotide for C14orf59
gacgtagggacggaga

SEQ ID NO: 516 - DNA, 16 bp, Artificial Sequence
  Detection oligonucleotide for C14orf59
gatgtagggatggaga

SEQ ID NO: 517 - DNA, 20 bp, Artificial Sequence
  Detection oligonucleotide for C14orf59
tatcgtggttttttacgtat

SEQ ID NO: 518 - DNA, 20 bp, Artificial Sequence
  Detection oligonucleotide for C14orf59
attgtggttttttatgtata

SEQ ID NO: 519 - DNA, 16 bp, Artificial Sequence
  Detection oligonucleotide for C14orf59
gtgttcgagagcgagt

SEQ ID NO: 520 - DNA, 17 bp, Artificial Sequence
  Detection oligonucleotide for C14orf59
tgtttgagagtgagtgt

SEQ ID NO: 521 - DNA, 16 bp, Artificial Sequence
  Detection oligonucleotide for C14orf59
tttattcggtgttcga

SEQ ID NO: 522 - DNA, 17 bp, Artificial Sequence
  Detection oligonucleotide for C14orf59
tatttggtgtttgagag

SEQ ID NO: 523 - DNA, 16 bp, Artificial Sequence
  Detection oligonucleotide for SNRPN
tttttgcggtcgcgta

SEQ ID NO: 524 - DNA, 17 bp, Artificial Sequence
  Detection oligonucleotide for SNRPN
ttttgtggttgtgtagg

SEQ ID NO: 525 - DNA, 16 bp, Artificial Sequence
  Detection oligonucleotide for SNRPN
agtatgcgcgttagtt

SEQ ID NO: 526 - DNA, 17 bp, Artificial Sequence
  Detection oligonucleotide for SNRPN
tgagtatgtgtgttagt

SEQ ID NO: 527 - DNA, 17 bp, Artificial Sequence
  Detection oligonucleotide for SNRPN
tagcggtaggtttcgta

SEQ ID NO: 528 - DNA, 17 bp, Artificial Sequence
  Detection oligonucleotide for SNRPN
tagtggtaggttttgta

SEQ ID NO: 529 - DNA, 16 bp, Artificial Sequence
  Detection oligonucleotide for SNRPN
tttgcgttagattcgt

SEQ ID NO: 530 - DNA, 17 bp, Artificial Sequence
  Detection oligonucleotide for SNRPN
tgtgttagatttgttgt

SEQ ID NO: 531 - DNA, 16 bp, Artificial Sequence
  Detection oligonucleotide for ARHGEF18
gtcgattcggttgatt

SEQ ID NO: 532 - DNA, 16 bp, Artificial Sequence
  Detection oligonucleotide for ARHGEF18
aaggttgatttggttg

SEQ ID NO: 533 - DNA, 16 bp, Artificial Sequence
  Detection oligonucleotide for ARHGEF18
ggcggtttcgaagatt

SEQ ID NO: 534 - DNA, 16 bp, Artificial Sequence
  Detection oligonucleotide for ARHGEF18
agatgggtggttttga

SEQ ID NO: 535 - DNA, 17 bp, Artificial Sequence
  Detection oligonucleotide for ARHGEF18
aagtcggttatgagcga

SEQ ID NO: 536 - DNA, 17 bp, Artificial Sequence
  Detection oligonucleotide for ARHGEF18
aagttggttatgagtga

SEQ ID NO: 537 - DNA, 16 bp, Artificial Sequence
  Detection oligonucleotide for ARHGEF18
tggtcgatacggtatt

SEQ ID NO: 538 - DNA, 16 bp, Artificial Sequence
  Detection oligonucleotide for ARHGEF18
ttgtggttgatatggt

SEQ ID NO: 539 - DNA, 16 bp, Artificial Sequence
  Detection oligonucleotide for SNX8
aggacgcgatagggat

SEQ ID NO: 540 - DNA, 16 bp, Artificial Sequence
  Detection oligonucleotide for SNX8
aggatgtgatagggat

SEQ ID NO: 541 - DNA, 16 bp, Artificial Sequence
  Detection oligonucleotide for SNX8
atttcgtcgtatgtga

SEQ ID NO: 542 - DNA, 18 bp, Artificial Sequence
  Detection oligonucleotide for SNX8
attttgttgtatgtgaag

SEQ ID NO: 543 - DNA, 16 bp, Artificial Sequence
  Detection oligonucleotide for SNX8
gtcgtttgcgtattta

SEQ ID NO: 544 - DNA, 18 bp, Artificial Sequence
  Detection oligonucleotide for SNX8
ggttgtttgtgtatttaa

SEQ ID NO: 545 - DNA, 16 bp, Artificial Sequence
  Detection oligonucleotide for SNX8
attgtatacgcgcgtt

SEQ ID NO: 546 - DNA, 17 bp, Artificial Sequence
  Detection oligonucleotide for SNX8
ttgtatatgtgtgttgg

SEQ ID NO: 547 - DNA, 16 bp, Artificial Sequence
  Detection oligonucleotide for FBN2
taaagcgagtagacgg

SEQ ID NO: 548 - DNA, 18 bp, Artificial Sequence
  Detection oligonucleotide for FBN2
tataaagtgagtagatgg

SEQ ID NO: 549 - DNA, 16 bp, Artificial Sequence
  Detection oligonucleotide for HOXB5
atagttttcggcgggt

SEQ ID NO: 550 - DNA, 17 bp, Artificial Sequence
  Detection oligonucleotide for HOXB5
tatagtttttggtgggt

SEQ ID NO: 551 - DNA, 16 bp, Artificial Sequence
  Detection oligonucleotide for HOXB5
tttttcggcgtagata

SEQ ID NO: 552 - DNA, 17 bp, Artificial Sequence
  Detection oligonucleotide for HOXB5
tgttttttggtgtagat

SEQ ID NO: 553 - DNA, 16 bp, Artificial Sequence
  Detection oligonucleotide for HOXB5
agtcgagggcgttaga

SEQ ID NO: 554 - DNA, 16 bp, Artificial Sequence
  Detection oligonucleotide for HOXB5
agttgagggtgttaga

SEQ ID NO: 555 - DNA, 16 bp, Artificial Sequence
  Detection oligonucleotide for HOXB5
ttttcgaggaattcgt

SEQ ID NO: 556 - DNA, 18 bp, Artificial Sequence
  Detection oligonucleotide for HOXB5
ttttttgaggaatttgtt

SEQ ID NO: 557 - DNA, 16 bp, Artificial Sequence
  Detection oligonucleotide for LIMK1
tatcggattatcgcgg

SEQ ID NO: 558 - DNA, 17 bp, Artificial Sequence
  Detection oligonucleotide for LIMK1
attggattattgtgggg

SEQ ID NO: 559 - DNA, 18 bp, Artificial Sequence
  Detection oligonucleotide for LIMK1
gtcggtagtttatcggat

SEQ ID NO: 560 - DNA, 18 bp, Artificial Sequence
  Detection oligonucleotide for LIMK1
gttggtagtttattggat

SEQ ID NO: 561 - DNA, 16 bp, Artificial Sequence
  Detection oligonucleotide for LIMK1
taggagacgttacgtt

SEQ ID NO: 562 - DNA, 17 bp, Artificial Sequence
  Detection oligonucleotide for LIMK1
agatgttatgttagggt

SEQ ID NO: 563 - DNA, 16 bp, Artificial Sequence
  Detection oligonucleotide for PSD/Q9H469
tttttcgaagcggatt

SEQ ID NO: 564 - DNA, 17 bp, Artificial Sequence
  Detection oligonucleotide for PSD/Q9H469
tttgaagtggattttgg

SEQ ID NO: 565 - DNA, 16 bp, Artificial Sequence
  Detection oligonucleotide for PSD/Q9H469
gaaacgcggtttaaat

SEQ ID NO: 566 - DNA, 18 bp, Artificial Sequence
  Detection oligonucleotide for PSD/Q9H469
ggaaatgtggtttaaatt

SEQ ID NO: 567 - DNA, 16 bp, Artificial Sequence
  Detection oligonucleotide for SLC38A1
tttgcggtaacgttta

SEQ ID NO: 568 - DNA, 17 bp, Artificial Sequence
  Detection oligonucleotide for SLC38A1
ttgtggtaatgtttagg

SEQ ID NO: 569 - DNA, 16 bp, Artificial Sequence
  Detection oligonucleotide for SLC38A1
tagcggtcgcggatta

SEQ ID NO: 570 - DNA, 16 bp, Artificial Sequence
  Detection oligonucleotide for SLC38A1
gtagtggttgtggatt

SEQ ID NO: 571 - DNA, 16 bp, Artificial Sequence
  Detection oligonucleotide for SLC38A1
ttagggacgcgaatta

SEQ ID NO: 572 - DNA, 16 bp, Artificial Sequence
  Detection oligonucleotide for SLC38A1
agggatgtgaattagg

SEQ ID NO: 573 - DNA, 17 bp, Artificial Sequence
  Detection oligonucleotide for SLC38A1
tgcgtttaagatcgcgt

SEQ ID NO: 574 - DNA, 17 bp, Artificial Sequence
  Detection oligonucleotide for SLC38A1
tgtgtttaagattgtgt

SEQ ID NO: 575 - DNA, 16 bp, Artificial Sequence
  Detection oligonucleotide for SLC38A1
atttcggttttcgaaa

SEQ ID NO: 576 - DNA, 19 bp, Artificial Sequence
  Detection oligonucleotide for SLC38A1
atattttggtttttgaaaa

SEQ ID NO: 577 - DNA, 18 bp, Artificial Sequence
  Detection oligonucleotide for SLC38A1
agagcgtagttgattcga

SEQ ID NO: 578 - DNA, 18 bp, Artificial Sequence
  Detection oligonucleotide for SLC38A1
agagtgtagttgatttga

SEQ ID NO: 579 - DNA, 16 bp, Artificial Sequence
  Detection oligonucleotide for SLC38A1
aggaattacgtacgtt

SEQ ID NO: 580 - DNA, 17 bp, Artificial Sequence
  Detection oligonucleotide for SLC38A1
tatgtatgtttggaggg

SEQ ID NO: 581 - DNA, 16 bp, Artificial Sequence
  Detection oligonucleotide for SLC38A1
tttgtaacgcggggaa

SEQ ID NO: 582 - DNA, 16 bp, Artificial Sequence
  Detection oligonucleotide for SLC38A1
ttttgtaatgtgggga

SEQ ID NO: 583 - DNA, 16 bp, Artificial Sequence
  Detection oligonucleotide for HIST1H4J
tatggcggtgatcgtt

SEQ ID NO: 584 - DNA, 17 bp, Artificial Sequence
  Detection oligonucleotide for HIST1H4J
tttatggtggtgattgt

SEQ ID NO: 585 - DNA, 16 bp, Artificial Sequence
  Detection oligonucleotide for HIST1H4J
ttacggcgtttcggat

SEQ ID NO: 586 - DNA, 17 bp, Artificial Sequence
  Detection oligonucleotide for HIST1H4J
ttatggtgttttggatt

SEQ ID NO: 587 - DNA, 16 bp, Artificial Sequence
  Detection oligonucleotide for HIST1H4J
atgcgttttacgtcgt

SEQ ID NO: 588 - DNA, 18 bp, Artificial Sequence
  Detection oligonucleotide for HIST1H4J
agatgtgttttatgttgt

SEQ ID NO: 589 - DNA, 16 bp, Artificial Sequence
  Detection oligonucleotide for HIST1H4J
tattgtcgcgtagtat

SEQ ID NO: 590 - DNA, 17 bp, Artificial Sequence
  Detection oligonucleotide for HIST1H4J
ggatattgttgtgtagt

SEQ ID NO: 591 - DNA, 16 bp, Artificial Sequence
  Detection oligonucleotide for HIST1H4J
atcgaaatcgtagagg

SEQ ID NO: 592 - DNA, 17 bp, Artificial Sequence
  Detection oligonucleotide for HIST1H4J
attgaaattgtagaggg

SEQ ID NO: 593 - DNA, 16 bp, Artificial Sequence
  Detection oligonucleotide for Q96S01
atcggtttttcgaggt

SEQ ID NO: 594 - DNA, 17 bp, Artificial Sequence
  Detection oligonucleotide for Q96S01
attggttttttgaggtt

SEQ ID NO: 595 - DNA, 16 bp, Artificial Sequence
  Detection oligonucleotide for Q96S01
ggtcgattttcgcgta

SEQ ID NO: 596 - DNA, 17 bp, Artificial Sequence
  Detection oligonucleotide for Q96S01
tggttgatttttgtgta

SEQ ID NO: 597 - DNA, 16 bp, Artificial Sequence
  Detection oligonucleotide for FOXL2
aatcgtgcggttgata

SEQ ID NO: 598 - DNA, 16 bp, Artificial Sequence
  Detection oligonucleotide for FOXL2
tgtagaattgtgtggt

SEQ ID NO: 599 - DNA, 16 bp, Artificial Sequence
  Detection oligonucleotide for FOXL2
aaaattcgaggtcggg

SEQ ID NO: 600 - DNA, 16 bp, Artificial Sequence
  Detection oligonucleotide for FOXL2
aaaatttgaggttggg

SEQ ID NO: 601 - DNA, 16 bp, Artificial Sequence
  Detection oligonucleotide for FOXL2
ttttcgcggttcggag

SEQ ID NO: 602 - DNA, 16 bp, Artificial Sequence
  Detection oligonucleotide for FOXL2
tttgtggtttggagaa

SEQ ID NO: 603 - DNA, 16 bp, Artificial Sequence
  Detection oligonucleotide for FOXL2
aataggcgatgtacgg

SEQ ID NO: 604 - DNA, 16 bp, Artificial Sequence
  Detection oligonucleotide for FOXL2
taggtgatgtatgggt

SEQ ID NO: 605 - DNA, 16 bp, Artificial Sequence
  Detection oligonucleotide for FOXL2
ttggtcggttaatcga

SEQ ID NO: 606 - DNA, 17 bp, Artificial Sequence
  Detection oligonucleotide for FOXL2
tttggttggttaattga

SEQ ID NO: 607 - DNA, 16 bp, Artificial Sequence
  Detection oligonucleotide for FOXL2
tagcggtcgcgaaaat

SEQ ID NO: 608 - DNA, 16 bp, Artificial Sequence
  Detection oligonucleotide for FOXL2
agtttagtggttgtga

SEQ ID NO: 609 - DNA, 16 bp, Artificial Sequence
  Detection oligonucleotide for CMYA3
tttacgcggggtttta

SEQ ID NO: 610 - DNA, 17 bp, Artificial Sequence
  Detection oligonucleotide for CMYA3
tttatgtggggttttag

SEQ ID NO: 611 - DNA, 17 bp, Artificial Sequence
  Detection oligonucleotide for CMYA3
ttacgtcgttattaggt

SEQ ID NO: 612 - DNA, 19 bp, Artificial Sequence
  Detection oligonucleotide for CMYA3
ttttatgttgttattaggt

SEQ ID NO: 613 - DNA, 16 bp, Artificial Sequence
  Detection oligonucleotide for CMYA3
tatttggacgtcgggt

SEQ ID NO: 614 - DNA, 16 bp, Artificial Sequence
  Detection oligonucleotide for CMYA3
tatttggatgttgggt

SEQ ID NO: 615 - DNA, 16 bp, Artificial Sequence
  Detection oligonucleotide for CMYA3
tttgtcggaaagcgga

SEQ ID NO: 616 - DNA, 16 bp, Artificial Sequence
  Detection oligonucleotide for CMYA3
tttgttggaaagtgga

SEQ ID NO: 617 - DNA, 16 bp, Artificial Sequence
  Detection oligonucleotide for ORC4L
attcggatcgttacgt

SEQ ID NO: 618 - DNA, 18 bp, Artificial Sequence
  Detection oligonucleotide for ORC4L
atttggattgttatgttt

SEQ ID NO: 619 - DNA, 16 bp, Artificial Sequence
  Detection oligonucleotide for ORC4L
ataagacggagttcgt

SEQ ID NO: 620 - DNA, 17 bp, Artificial Sequence
  Detection oligonucleotide for ORC4L
aagatggagtttgtttg

SEQ ID NO: 621 - DNA, 16 bp, Artificial Sequence
  Detection oligonucleotide for ORC4L
ttgcgttatcgacgtt

SEQ ID NO: 622 - DNA, 18 bp, Artificial Sequence
  Detection oligonucleotide for ORC4L
attttgtgttattgatgt

SEQ ID NO: 623 - DNA, 16 bp, Artificial Sequence
  Detection oligonucleotide for ORC4L
gagtaacgcgtgtgat

SEQ ID NO: 624 - DNA, 17 bp, Artificial Sequence
  Detection oligonucleotide for ORC4L
tatgagtaatgtgtgtg

SEQ ID NO: 625 - DNA, 16 bp, Artificial Sequence
  Detection oligonucleotide for ABHD9
tatttgggcgcgatag

SEQ ID NO: 626 - DNA, 16 bp, Artificial Sequence
  Detection oligonucleotide for ABHD9
atttgggtgtgatagg

SEQ ID NO: 627 - DNA, 16 bp, Artificial Sequence
  Detection oligonucleotide for ABHD9
gtgggacgcgttgaag

SEQ ID NO: 628 - DNA, 16 bp, Artificial Sequence
  Detection oligonucleotide for ABHD9
tgtgggatgtgttgaa

SEQ ID NO: 629 - DNA, 16 bp, Artificial Sequence
  Detection oligonucleotide for ABHD9
ggcggtttcgatagaa

SEQ ID NO: 630 - DNA, 16 bp, Artificial Sequence
  Detection oligonucleotide for ABHD9
gggtggttttgataga

SEQ ID NO: 631 - DNA, 16 bp, Artificial Sequence
  Detection oligonucleotide for CCND2
ataagtcgttcgaggt

SEQ ID NO: 632 - DNA, 16 bp, Artificial Sequence
  Detection oligonucleotide for CCND2
aagttgtttgaggtgt

SEQ ID NO: 633 - DNA, 16 bp, Artificial Sequence
  Detection oligonucleotide for CCND2
tagcggttacgtagga

SEQ ID NO: 634 - DNA, 17 bp, Artificial Sequence
  Detection oligonucleotide for CCND2
agtggttatgtaggaaa

SEQ ID NO: 635 - DNA, 17 bp, Artificial Sequence
  Detection oligonucleotide for CCND2
tacgtgttttaacgtat

SEQ ID NO: 636 - DNA, 19 bp, Artificial Sequence
  Detection oligonucleotide for CCND2
tgatatgtgttttaatgta

SEQ ID NO: 637 - DNA, 17 bp, Artificial Sequence
  Detection oligonucleotide for CCND2
ttagggtcgtcgtaggt

SEQ ID NO: 638 - DNA, 17 bp, Artificial Sequence
  Detection oligonucleotide for CCND2
ttagggttgttgtaggt

SEQ ID NO: 639 - DNA, 16 bp, Artificial Sequence
  Detection oligonucleotide for CCND2
ttagtacggtcggttt

SEQ ID NO: 640 - DNA, 17 bp, Artificial Sequence
  Detection oligonucleotide for CCND2
gttagtatggttggttt

SEQ ID NO: 641 - DNA, 16 bp, Artificial Sequence
  Detection oligonucleotide for CDKN2A
taggtatcgcgtacgt

SEQ ID NO: 642 - DNA, 18 bp, Artificial Sequence
  Detection oligonucleotide for CDKN2A
ttaggtattgtgtatgtt

SEQ ID NO: 643 - DNA, 16 bp, Artificial Sequence
  Detection oligonucleotide for CDKN2A
ttcgcgtcgtggagta

SEQ ID NO: 644 - DNA, 17 bp, Artificial Sequence
  Detection oligonucleotide for CDKN2A
ttttgtgttgtggagta

SEQ ID NO: 645 - DNA, 16 bp, Artificial Sequence
  Detection oligonucleotide for CDKN2A
tagtcgcgcgtaggta

SEQ ID NO: 646 - DNA, 17 bp, Artificial Sequence
  Detection oligonucleotide for CDKN2A
tagttgtgtgtaggtat

SEQ ID NO: 647 - DNA, 16 bp, Artificial Sequence
  Detection oligonucleotide for CDKN2A
taggtatcgtgcgata

SEQ ID NO: 648 - DNA, 18 bp, Artificial Sequence
  Detection oligonucleotide for CDKN2A
gtaggtattgtgtgatat

SEQ ID NO: 649 - DNA, 17 bp, Artificial Sequence
  Detection oligonucleotide for CD44
taggttcggttcgttat

SEQ ID NO: 650 - DNA, 18 bp, Artificial Sequence
  Detection oligonucleotide for CD44
taggtttggtttgttatt

SEQ ID NO: 651 - DNA, 16 bp, Artificial Sequence
  Detection oligonucleotide for CD44
gtttcgcgtttaggga

SEQ ID NO: 652 - DNA, 17 bp, Artificial Sequence
  Detection oligonucleotide for CD44
gttttgtgtttagggat

SEQ ID NO: 653 - DNA, 17 bp, Artificial Sequence
  Detection oligonucleotide for CD44
gttcgtttcggatatta

SEQ ID NO: 654 - DNA, 19 bp, Artificial Sequence
  Detection oligonucleotide for CD44
tttgttttggatattatgg

SEQ ID NO: 655 - DNA, 16 bp, Artificial Sequence
  Detection oligonucleotide for CD44
tttggcgtagatcggt

SEQ ID NO: 656 - DNA, 16 bp, Artificial Sequence
  Detection oligonucleotide for CD44
tttggtgtagattggt

SEQ ID NO: 657 - DNA, 16 bp, Artificial Sequence
  Detection oligonucleotide for EDNRB1
ttcgtttttcgggaag

SEQ ID NO: 658 - DNA, 17 bp, Artificial Sequence
  Detection oligonucleotide for EDNRB1
tttgttttttgggaagg

SEQ ID NO: 659 - DNA, 16 bp, Artificial Sequence
  Detection oligonucleotide for EDNRB1
tagagtcggattcgtt

SEQ ID NO: 660 - DNA, 17 bp, Artificial Sequence
  Detection oligonucleotide for EDNRB1
agttggatttgtttgta

SEQ ID NO: 661 - DNA, 16 bp, Artificial Sequence
  Detection oligonucleotide for EDNRB1
gtattttcgtagcgtt

SEQ ID NO: 662 - DNA, 18 bp, Artificial Sequence
  Detection oligonucleotide for EDNRB1
tggtatttttgtagtgtt

SEQ ID NO: 663 - DNA, 16 bp, Artificial Sequence
  Detection oligonucleotide for EDNRB1
atttcgagtaaacggt

SEQ ID NO: 664 - DNA, 17 bp, Artificial Sequence
  Detection oligonucleotide for EDNRB1
tttgagtaaatggtgga

SEQ ID NO: 665 - DNA, 16 bp, Artificial Sequence
  Detection oligonucleotide for ELK1
tgtcgtacgttatgtt

SEQ ID NO: 666 - DNA, 17 bp, Artificial Sequence
  Detection oligonucleotide for ELK1
ggtgttgtatgttatgt

SEQ ID NO: 667 - DNA, 16 bp, Artificial Sequence
  Detection oligonucleotide for ELK1
tgggcgtagtagtcgg

SEQ ID NO: 668 - DNA, 17 bp, Artificial Sequence
  Detection oligonucleotide for ELK1
atgggtgtagtagttgg

SEQ ID NO: 669 - DNA, 17 bp, Artificial Sequence
  Detection oligonucleotide for ELK1
attgggtttcgcgtagg

SEQ ID NO: 670 - DNA, 17 bp, Artificial Sequence
  Detection oligonucleotide for ELK1
attgggttttgtgtagg

SEQ ID NO: 671 - DNA, 16 bp, Artificial Sequence
  Detection oligonucleotide for ELK1
ttgattggcggacgag

SEQ ID NO: 672 - DNA, 16 bp, Artificial Sequence
  Detection oligonucleotide for ELK1
ttgattggtggatgag

SEQ ID NO: 673 - DNA, 17 bp, Artificial Sequence
  Detection oligonucleotide for FOS
tacggatttggtcgttt

SEQ ID NO: 674 - DNA, 17 bp, Artificial Sequence
  Detection oligonucleotide for FOS
tatggatttggttgttt

SEQ ID NO: 675 - DNA, 16 bp, Artificial Sequence
  Detection oligonucleotide for FOS
ttcgattagttcggat

SEQ ID NO: 676 - DNA, 19 bp, Artificial Sequence
  Detection oligonucleotide for FOS
tattttgattagtttggat

SEQ ID NO: 677 - DNA, 18 bp, Artificial Sequence
  Detection oligonucleotide for FOS
tttcgtggttttatcgta

SEQ ID NO: 678 - DNA, 18 bp, Artificial Sequence
  Detection oligonucleotide for FOS
ttttgtggttttattgta

SEQ ID NO: 679 - DNA, 16 bp, Artificial Sequence
  Detection oligonucleotide for FOS
gtcgagcgtagagtat

SEQ ID NO: 680 - DNA, 16 bp, Artificial Sequence
  Detection oligonucleotide for FOS
taggaggttgagtgta

SEQ ID NO: 681 - DNA, 16 bp, Artificial Sequence
  Detection oligonucleotide for GSTP1
gtcggtcgtagagggg

SEQ ID NO: 682 - DNA, 16 bp, Artificial Sequence
  Detection oligonucleotide for GSTP1
gttggttgtagagggg

SEQ ID NO: 683 - DNA, 16 bp, Artificial Sequence
  Detection oligonucleotide for GSTP1
ttcgcggttttcgagt

SEQ ID NO: 684 - DNA, 17 bp, Artificial Sequence
  Detection oligonucleotide for GSTP1
tttgtggtttttgagtt

SEQ ID NO: 685 - DNA, 16 bp, Artificial Sequence
  Detection oligonucleotide for GSTP1
gtcgcgcgtatttatt

SEQ ID NO: 686 - DNA, 17 bp, Artificial Sequence
  Detection oligonucleotide for GSTP1
gggttgtgtgtatttat

SEQ ID NO: 687 - DNA, 16 bp, Artificial Sequence
  Detection oligonucleotide for GSTP1
gagtcgtcgcgtagtt

SEQ ID NO: 688 - DNA, 17 bp, Artificial Sequence
  Detection oligonucleotide for GSTP1
ggagttgttgtgtagtt

SEQ ID NO: 689 - DNA, 16 bp, Artificial Sequence
  Detection oligonucleotide for CD37
atcgagagcgttatga

SEQ ID NO: 690 - DNA, 17 bp, Artificial Sequence
  Detection oligonucleotide for CD37
aggaatattgagagtgt

SEQ ID NO: 691 - DNA, 16 bp, Artificial Sequence
  Detection oligonucleotide for CD37
tatcgagcgagtcggt

SEQ ID NO: 692 - DNA, 17 bp, Artificial Sequence
  Detection oligonucleotide for CD37
tattgagtgagttggtt

SEQ ID NO: 693 - DNA, 16 bp, Artificial Sequence
  Detection oligonucleotide for CD37
ttagcgtacgtgacgg

SEQ ID NO: 694 - DNA, 16 bp, Artificial Sequence
  Detection oligonucleotide for CD37
agtgtatgtgatgggg

SEQ ID NO: 695 - DNA, 16 bp, Artificial Sequence
  Detection oligonucleotide for CD37
gggtacgtagttacgt

SEQ ID NO: 696 - DNA, 17 bp, Artificial Sequence
  Detection oligonucleotide for CD37
tatgtagttatgtgggt

SEQ ID NO: 697 - DNA, 16 bp, Artificial Sequence
  Detection oligonucleotide for GRN
tagcgcgatgattcgt

SEQ ID NO: 698 - DNA, 17 bp, Artificial Sequence
  Detection oligonucleotide for GRN
agtgtgatgatttgttt

SEQ ID NO: 699 - DNA, 16 bp, Artificial Sequence
  Detection oligonucleotide for GRN
taatcgggtagcgttt

SEQ ID NO: 700 - DNA, 17 bp, Artificial Sequence
  Detection oligonucleotide for GRN
tagtaattgggtagtgt

SEQ ID NO: 701 - DNA, 16 bp, Artificial Sequence
  Detection oligonucleotide for GRN
ttcgatttcgcggttt

SEQ ID NO: 702 - DNA, 17 bp, Artificial Sequence
  Detection oligonucleotide for GRN
gtttgattttgtggttt

SEQ ID NO: 703 - DNA, 16 bp, Artificial Sequence
  Detection oligonucleotide for GRN
tttaacggggcgttat

SEQ ID NO: 704 - DNA, 16 bp, Artificial Sequence
  Detection oligonucleotide for GRN
aatggggtgttattgt

SEQ ID NO: 705 - DNA, 16 bp, Artificial Sequence
  Detection oligonucleotide for EPAS1
ttcggcgttattcgag

SEQ ID NO: 706 - DNA, 17 bp, Artificial Sequence
  Detection oligonucleotide for EPAS1
ggtttggtgttatttga

SEQ ID NO: 707 - DNA, 16 bp, Artificial Sequence
  Detection oligonucleotide for EPAS1
tattcgtgcggtttta

SEQ ID NO: 708 - DNA, 17 bp, Artificial Sequence
  Detection oligonucleotide for EPAS1
atttgtgtggttttagt

SEQ ID NO: 709 - DNA, 16 bp, Artificial Sequence
  Detection oligonucleotide for EPAS1
gaatttaacgcgcggt

SEQ ID NO: 710 - DNA, 17 bp, Artificial Sequence
  Detection oligonucleotide for EPAS1
ggaatttaatgtgtggt

SEQ ID NO: 711 - DNA, 16 bp, Artificial Sequence
  Detection oligonucleotide for EPAS1
ttcgcgagtttttcgg

SEQ ID NO: 712 - DNA, 18 bp, Artificial Sequence
  Detection oligonucleotide for EPAS1
tttgtgagttttttggta

SEQ ID NO: 713 - DNA, 16 bp, Artificial Sequence
  Detection oligonucleotide for NOTCH1
tttacgggcgggagtt

SEQ ID NO: 714 - DNA, 16 bp, Artificial Sequence
  Detection oligonucleotide for NOTCH1
ttttatgggtgggagt

SEQ ID NO: 715 - DNA, 16 bp, Artificial Sequence
  Detection oligonucleotide for NOTCH1
tagcgggcgagtagtt

SEQ ID NO: 716 - DNA, 16 bp, Artificial Sequence
  Detection oligonucleotide for NOTCH1
tagtgggtgagtagtt

SEQ ID NO: 717 - DNA, 16 bp, Artificial Sequence
  Detection oligonucleotide for NOTCH1
aggcggtttcgatttt

SEQ ID NO: 718 - DNA, 16 bp, Artificial Sequence
  Detection oligonucleotide for NOTCH1
tggaggtggttttgat

SEQ ID NO: 719 - DNA, 16 bp, Artificial Sequence
  Detection oligonucleotide for NOTCH1
atttcggcggttggat

SEQ ID NO: 720 - DNA, 17 bp, Artificial Sequence
  Detection oligonucleotide for NOTCH1
aggtaattttggtggtt

SEQ ID NO: 721 - DNA, 20 bp, Artificial Sequence
  Detection oligonucleotide for MLLT3
taattcggttagattttcgg

SEQ ID NO: 722 - DNA, 20 bp, Artificial Sequence
  Detection oligonucleotide for MLLT3
taatttggttagatttttgg

SEQ ID NO: 723 - DNA, 16 bp, Artificial Sequence
  Detection oligonucleotide for MLLT3
tttagagtcgcgtttt

SEQ ID NO: 724 - DNA, 17 bp, Artificial Sequence
  Detection oligonucleotide for MLLT3
tagagttgtgtttttgt

SEQ ID NO: 725 - DNA, 16 bp, Artificial Sequence
  Detection oligonucleotide for MLLT3
tagaatagcgcggtta

SEQ ID NO: 726 - DNA, 18 bp, Artificial Sequence
  Detection oligonucleotide for MLLT3
gatagaatagtgtggtta

SEQ ID NO: 727 - DNA, 16 bp, Artificial Sequence
  Detection oligonucleotide for SOLH
taggggacgtgtacga

SEQ ID NO: 728 - DNA, 16 bp, Artificial Sequence
  Detection oligonucleotide for SOLH
taggggatgtgtatga

SEQ ID NO: 729 - DNA, 16 bp, Artificial Sequence
  Detection oligonucleotide for SOLH
gacggaacgtatgttt

SEQ ID NO: 730 - DNA, 16 bp, Artificial Sequence
  Detection oligonucleotide for SOLH
tggggatggaatgtat

SEQ ID NO: 731 - DNA, 16 bp, Artificial Sequence
  Detection oligonucleotide for SOLH
attcgtggggacggaa

SEQ ID NO: 732 - DNA, 16 bp, Artificial Sequence
  Detection oligonucleotide for SOLH
atttgtggggatggaa

SEQ ID NO: 733 - DNA, 17 bp, Artificial Sequence
  Detection oligonucleotide for SEQ ID NO: 44
tagggttcgttcgtatt

SEQ ID NO: 734 - DNA, 18 bp, Artificial Sequence
  Detection oligonucleotide for SEQ ID NO: 44
tttagggtttgtttgtat

SEQ ID NO: 735 - DNA, 16 bp, Artificial Sequence
  Detection oligonucleotide for SEQ ID NO: 44
ttacgattttcggggt

SEQ ID NO: 736 - DNA, 17 bp, Artificial Sequence
  Detection oligonucleotide for SEQ ID NO: 44
tttatgatttttggggt

SEQ ID NO: 737 - DNA, 16 bp, Artificial Sequence
  Detection oligonucleotide for SEQ ID NO: 44
aagtagacgtcggaga

SEQ ID NO: 738 - DNA, 16 bp, Artificial Sequence
  Detection oligonucleotide for SEQ ID NO: 44
tagatgttggagaggg

SEQ ID NO: 739 - DNA, 16 bp, Artificial Sequence
  Detection oligonucleotide for SEQ ID NO: 44
tgtcgttacgtttagg

SEQ ID NO: 740 - DNA, 17 bp, Artificial Sequence
  Detection oligonucleotide for SEQ ID NO: 44
gttgttatgtttagggt

SEQ ID NO: 741 - DNA, 16 bp, Artificial Sequence
  Detection oligonucleotide for Q8N365
agattcggagagacgg

SEQ ID NO: 742 - DNA, 17 bp, Artificial Sequence
  Detection oligonucleotide for Q8N365
tagatttggagagatgg

SEQ ID NO: 743 - DNA, 16 bp, Artificial Sequence
  Detection oligonucleotide for Q8N365
agatcggcgtagggat

SEQ ID NO: 744 - DNA, 16 bp, Artificial Sequence
  Detection oligonucleotide for Q8N365
agattggtgtagggat

SEQ ID NO: 745 - DNA, 16 bp, Artificial Sequence
  Detection oligonucleotide for Q8N365
tacgtgttatcggcga

SEQ ID NO: 746 - DNA, 18 bp, Artificial Sequence
  Detection oligonucleotide for Q8N365
tatgtgttattggtgata

SEQ ID NO: 747 - DNA, 16 bp, Artificial Sequence
  Detection oligonucleotide for Q8N365
tacgtgtcgggtcgta

SEQ ID NO: 748 - DNA, 17 bp, Artificial Sequence
  Detection oligonucleotide for Q8N365
gtatgtgttgggttgta

SEQ ID NO: 749 - DNA, 16 bp, Artificial Sequence
  Detection oligonucleotide for Q9NWV0
gtcgcgtggatacgtg

SEQ ID NO: 750 - DNA, 16 bp, Artificial Sequence
  Detection oligonucleotide for Q9NWV0
ggttgtgtggatatgt

SEQ ID NO: 751 - DNA, 16 bp, Artificial Sequence
  Detection oligonucleotide for Q9NWV0
ttggcgatttttacga

SEQ ID NO: 752 - DNA, 18 bp, Artificial Sequence
  Detection oligonucleotide for Q9NWV0
ttggtgatttttatgaga

SEQ ID NO: 753 - DNA, 16 bp, Artificial Sequence
  Detection oligonucleotide for Q9NWV0
tgtcgtagcgttatgt

SEQ ID NO: 754 - DNA, 17 bp, Artificial Sequence
  Detection oligonucleotide for Q9NWV0
aggtgttgtagtgttat

SEQ ID NO: 755 - DNA, 16 bp, Artificial Sequence
  Detection oligonucleotide for SEQ ID NO: 47
gtaacgcgtttggttt

SEQ ID NO: 756 - DNA, 16 bp, Artificial Sequence
  Detection oligonucleotide for SEQ ID NO: 47
tggtaatgtgtttggt

SEQ ID NO: 757 - DNA, 16 bp, Artificial Sequence
  Detection oligonucleotide for SEQ ID NO: 47
ttcgagcgttttacgt

SEQ ID NO: 758 - DNA, 18 bp, Artificial Sequence
  Detection oligonucleotide for SEQ ID NO: 47
ttttgagtgttttatgtt

SEQ ID NO: 759 - DNA, 16 bp, Artificial Sequence
  Detection oligonucleotide for SEQ ID NO: 47
ttacgtgggagcgttt

SEQ ID NO: 760 - DNA, 16 bp, Artificial Sequence
  Detection oligonucleotide for SEQ ID NO: 47
ttatgtgggagtgttt

SEQ ID NO: 761 - DNA, 16 bp, Artificial Sequence
  Detection oligonucleotide for SEQ ID NO: 47
tagttttacgcgggta

SEQ ID NO: 762 - DNA, 17 bp, Artificial Sequence
  Detection oligonucleotide for SEQ ID NO: 47
agttttatgtgggtatg

SEQ ID NO: 763 - DNA, 16 bp, Artificial Sequence
  Detection oligonucleotide for H2AFY2
atgaaaggcgcgagaa

SEQ ID NO: 764 - DNA, 16 bp, Artificial Sequence
  Detection oligonucleotide for H2AFY2
atgaaaggtgtgagaa

SEQ ID NO: 765 - DNA, 16 bp, Artificial Sequence
  Detection oligonucleotide for H2AFY2
gaatcgtggtttcgtt

SEQ ID NO: 766 - DNA, 16 bp, Artificial Sequence
  Detection oligonucleotide for H2AFY2
ggaattgtggttttgt

SEQ ID NO: 767 - DNA, 16 bp, Artificial Sequence
  Detection oligonucleotide for H2AFY2
tagtttatcgcggtaa

SEQ ID NO: 768 - DNA, 18 bp, Artificial Sequence
  Detection oligonucleotide for H2AFY2
tttattgtggtaaatggt

SEQ ID NO: 769 - DNA, 16 bp, Artificial Sequence
  Detection oligonucleotide for RHOC
tgcggttcgaagatta

SEQ ID NO: 770 - DNA, 16 bp, Artificial Sequence
  Detection oligonucleotide for RHOC
ggtgtggtttgaagat

SEQ ID NO: 771 - DNA, 16 bp, Artificial Sequence
  Detection oligonucleotide for RHOC
gaacgcgttttagcgt

SEQ ID NO: 772 - DNA, 17 bp, Artificial Sequence
  Detection oligonucleotide for RHOC
ggaatgtgttttagtgt

SEQ ID NO: 773 - DNA, 16 bp, Artificial Sequence
  Detection oligonucleotide for RHOC
ttttagcgtcggggat

SEQ ID NO: 774 - DNA, 16 bp, Artificial Sequence
  Detection oligonucleotide for RHOC
ttttagtgttggggat

SEQ ID NO: 775 - DNA, 16 bp, Artificial Sequence
  Detection oligonucleotide for NR2E1
tagtcgtattagcggt

SEQ ID NO: 776 - DNA, 18 bp, Artificial Sequence
  Detection oligonucleotide for NR2E1
tagttgtattagtggttt

SEQ ID NO: 777 - DNA, 16 bp, Artificial Sequence
  Detection oligonucleotide for NR2E1
tgcgttttattcgcgg

SEQ ID NO: 778 - DNA, 17 bp, Artificial Sequence
  Detection oligonucleotide for NR2E1
tgtgttttatttgtggt

SEQ ID NO: 779 - DNA, 16 bp, Artificial Sequence
  Detection oligonucleotide for NR2E1
tttcgaagtttcgcgg

SEQ ID NO: 780 - DNA, 16 bp, Artificial Sequence
  Detection oligonucleotide for NR2E1
tttgaagttttgtggg

SEQ ID NO: 781 - DNA, 16 bp, Artificial Sequence
  Detection oligonucleotide for NR2E1
tagcgcgaatcgttta

SEQ ID NO: 782 - DNA, 17 bp, Artificial Sequence
  Detection oligonucleotide for NR2E1
agtgtgaattgtttagt

SEQ ID NO: 783 - DNA, 16 bp, Artificial Sequence
  Detection oligonucleotide for KBTBD6
agacgtttcgcgtttt

SEQ ID NO: 784 - DNA, 17 bp, Artificial Sequence
  Detection oligonucleotide for KBTBD6
gaagatgttttgtgttt

SEQ ID NO: 785 - DNA, 16 bp, Artificial Sequence
  Detection oligonucleotide for KBTBD6
tttcgggaagacgttt

SEQ ID NO: 786 - DNA, 16 bp, Artificial Sequence
  Detection oligonucleotide for KBTBD6
agttttgggaagatgt

SEQ ID NO: 787 - DNA, 16 bp, Artificial Sequence
  Detection oligonucleotide for KBTBD6
tattagcgttcgtcgt

SEQ ID NO: 788 - DNA, 18 bp, Artificial Sequence
  Detection oligonucleotide for KBTBD6
gttattagtgtttgttgt

SEQ ID NO: 789 - DNA, 16 bp, Artificial Sequence
  Detection oligonucleotide for TRPM4
taggtgagcgtcggat

SEQ ID NO: 790 - DNA, 16 bp, Artificial Sequence
  Detection oligonucleotide for TRPM4
taggtgagtgttggat

SEQ ID NO: 791 - DNA, 16 bp, Artificial Sequence
  Detection oligonucleotide for TRPM4
agtagagtcggcggag

SEQ ID NO: 792 - DNA, 16 bp, Artificial Sequence
  Detection oligonucleotide for TRPM4
agtagagttggtggag

SEQ ID NO: 793 - DNA, 16 bp, Artificial Sequence
  Detection oligonucleotide for TCEB3BP1
gacgttagcgagtatt

SEQ ID NO: 794 - DNA, 16 bp, Artificial Sequence
  Detection oligonucleotide for TCEB3BP1
agggatgttagtgagt

SEQ ID NO: 795 - DNA, 16 bp, Artificial Sequence
  Detection oligonucleotide for TCEB3BP1
tgtcgggtcgagtagt

SEQ ID NO: 796 - DNA, 16 bp, Artificial Sequence
  Detection oligonucleotide for TCEB3BP1
tgttgggttgagtagt

SEQ ID NO: 797 - DNA, 16 bp, Artificial Sequence
  Detection oligonucleotide for Q8NCX8
ttacggcgggttttta

SEQ ID NO: 798 - DNA, 18 bp, Artificial Sequence
  Detection oligonucleotide for Q8NCX8
ttatggtgggtttttatt

SEQ ID NO: 799 - DNA, 17 bp, Artificial Sequence
  Detection oligonucleotide for Q8NCX8
ttcggtttatacgattt

SEQ ID NO: 800 - DNA, 20 bp, Artificial Sequence
  Detection oligonucleotide for Q8NCX8
atttggtttatatgattttt

SEQ ID NO: 801 - DNA, 16 bp, Artificial Sequence
  Detection oligonucleotide for Q8NCX8
ttacgtcgattatcgg

SEQ ID NO: 802 - DNA, 18 bp, Artificial Sequence
  Detection oligonucleotide for Q8NCX8
tatgttgattattggggt

SEQ ID NO: 803 - DNA, 16 bp, Artificial Sequence
  Detection oligonucleotide for SEQ ID NO: 55
aatttacgcgggtgtt

SEQ ID NO: 804 - DNA, 16 bp, Artificial Sequence
  Detection oligonucleotide for SEQ ID NO: 55
ggaatttatgtgggtg

SEQ ID NO: 805 - DNA, 16 bp, Artificial Sequence
  Detection oligonucleotide for SEQ ID NO: 55
tagttcgtttcggtta

SEQ ID NO: 806 - DNA, 17 bp, Artificial Sequence
  Detection oligonucleotide for SEQ ID NO: 55
agtttgttttggttagt

SEQ ID NO: 807 - DNA, 17 bp, Artificial Sequence
  Detection oligonucleotide for SEQ ID NO: 55
gtcgtgtacgaattcgt

SEQ ID NO: 808 - DNA, 18 bp, Artificial Sequence
  Detection oligonucleotide for SEQ ID NO: 55
gttgtgtatgaatttgtt

SEQ ID NO: 809 - DNA, 16 bp, Artificial Sequence
  Detection oligonucleotide for SEQ ID NO: 55
agcgtttaagtcgcgg

SEQ ID NO: 810 - DNA, 17 bp, Artificial Sequence
  Detection oligonucleotide for SEQ ID NO: 55
tagtgtttaagttgtgg

SEQ ID NO: 811 - DNA, 16 bp, Artificial Sequence
  Detection oligonucleotide for SNAPC2
ttacgatttcggtgtt

SEQ ID NO: 812 - DNA, 18 bp, Artificial Sequence
  Detection oligonucleotide for SNAPC2
tagagttatgattttggt

SEQ ID NO: 813 - DNA, 16 bp, Artificial Sequence
  Detection oligonucleotide for SNAPC2
aggcgtgcgtcgatat

SEQ ID NO: 814 - DNA, 17 bp, Artificial Sequence
  Detection oligonucleotide for SNAPC2
aggtgtgtgttgatatt

SEQ ID NO: 815 - DNA, 16 bp, Artificial Sequence
  Detection oligonucleotide for SNAPC2
gtagcgtcgagggttt

SEQ ID NO: 816 - DNA, 16 bp, Artificial Sequence
  Detection oligonucleotide for SNAPC2
gtagtgttgagggttt

SEQ ID NO: 817 - DNA, 16 bp, Artificial Sequence
  Detection oligonucleotide for SNAPC2
atacgttgacgtagtt

SEQ ID NO: 818 - DNA, 19 bp, Artificial Sequence
  Detection oligonucleotide for SNAPC2
ttgtatatgttgatgtagt

SEQ ID NO: 819 - DNA, 16 bp, Artificial Sequence
  Detection oligonucleotide for PTPRN2
gacgtagttcgtacgt

SEQ ID NO: 820 - DNA, 17 bp, Artificial Sequence
  Detection oligonucleotide for PTPRN2
ggatgtagtttgtatgt

SEQ ID NO: 821 - DNA, 16 bp, Artificial Sequence
  Detection oligonucleotide for PTPRN2
ttagtcgtttcgagat

SEQ ID NO: 822 - DNA, 18 bp, Artificial Sequence
  Detection oligonucleotide for PTPRN2
gttttagttgttttgaga

SEQ ID NO: 823 - DNA, 16 bp, Artificial Sequence
  Detection oligonucleotide for PTPRN2
ttacgcgtatcgggat

SEQ ID NO: 824 - DNA, 18 bp, Artificial Sequence
  Detection oligonucleotide for PTPRN2
tatgtgtattgggattta

SEQ ID NO: 825 - DNA, 16 bp, Artificial Sequence
  Detection oligonucleotide for PTPRN2
ttcgcgtttcgtaaga

SEQ ID NO: 826 - DNA, 19 bp, Artificial Sequence
  Detection oligonucleotide for PTPRN2
tttgtgttttgtaagatat

SEQ ID NO: 827 - DNA, 16 bp, Artificial Sequence
  Detection oligonucleotide for WDFY3
tattgagtcggtcgta

SEQ ID NO: 828 - DNA, 17 bp, Artificial Sequence
  Detection oligonucleotide for WDFY3
attgagttggttgtaga

SEQ ID NO: 829 - DNA, 16 bp, Artificial Sequence
  Detection oligonucleotide for WDFY3
tagatagcgtcgttgg

SEQ ID NO: 830 - DNA, 17 bp, Artificial Sequence
  Detection oligonucleotide for WDFY3
tagatagtgttgttgga

SEQ ID NO: 831 - DNA, 17 bp, Artificial Sequence
  Detection oligonucleotide for ZNF566
ataaaatacgacgttga

SEQ ID NO: 832 - DNA, 20 bp, Artificial Sequence
  Detection oligonucleotide for ZNF566
ataaaatatgatgttgaatt

SEQ ID NO: 833 - DNA, 16 bp, Artificial Sequence
  Detection oligonucleotide for ZNF566
agcgttttttacgaat

SEQ ID NO: 834 - DNA, 19 bp, Artificial Sequence
  Detection oligonucleotide for ZNF566
tagtgttttttatgaatga

SEQ ID NO: 835 - DNA, 17 bp, Artificial Sequence
  Detection oligonucleotide for Q9NP73
tattacggattttcgtt

SEQ ID NO: 836 - DNA, 19 bp, Artificial Sequence
  Detection oligonucleotide for Q9NP73
gttattatggatttttgtt

SEQ ID NO: 837 - DNA, 16 bp, Artificial Sequence
  Detection oligonucleotide for Q9NP73
tgcgttatattcggtt

SEQ ID NO: 838 - DNA, 18 bp, Artificial Sequence
  Detection oligonucleotide for Q9NP73
agttgtgttatatttggt

SEQ ID NO: 839 - DNA, 16 bp, Artificial Sequence
  Detection oligonucleotide for Q9NP73
aattcgcgttatgaag

SEQ ID NO: 840 - DNA, 18 bp, Artificial Sequence
  Detection oligonucleotide for Q9NP73
ttgaggaatttgtgttat

SEQ ID NO: 841 - DNA, 16 bp, Artificial Sequence
  Detection oligonucleotide for Q9NP73
gtcggcgttcgatagt

SEQ ID NO: 842 - DNA, 17 bp, Artificial Sequence
  Detection oligonucleotide for Q9NP73
tgttggtgtttgatagt

SEQ ID NO: 843 - DNA, 16 bp, Artificial Sequence
  Detection oligonucleotide for SEQ ID NO: 61
agaattcgtaaacggg

SEQ ID NO: 844 - DNA, 16 bp, Artificial Sequence
  Detection oligonucleotide for SEQ ID NO: 61
atttgtaaatgggggt

SEQ ID NO: 845 - DNA, 16 bp, Artificial Sequence
  Detection oligonucleotide for SEQ ID NO: 61
ttcggttatcgacggt

SEQ ID NO: 846 - DNA, 17 bp, Artificial Sequence
  Detection oligonucleotide for SEQ ID NO: 61
tttggttattgatggtt

SEQ ID NO: 847 - DNA, 16 bp, Artificial Sequence
  Detection oligonucleotide for Q86SP6
atcgtgagcgtagcgt

SEQ ID NO: 848 - DNA, 17 bp, Artificial Sequence
  Detection oligonucleotide for Q86SP6
attgtgagtgtagtgta

SEQ ID NO: 849 - DNA, 16 bp, Artificial Sequence
  Detection oligonucleotide for Q86SP6
taggcgtgagaatcgg

SEQ ID NO: 850 - DNA, 16 bp, Artificial Sequence
  Detection oligonucleotide for Q86SP6
taggtgtgagaattgg

SEQ ID NO: 851 - DNA, 16 bp, Artificial Sequence
  Detection oligonucleotide for Q86SP6
atcgtgttcggatcgg

SEQ ID NO: 852 - DNA, 17 bp, Artificial Sequence
  Detection oligonucleotide for Q86SP6
tattgtgtttggattgg

SEQ ID NO: 853 - DNA, 16 bp, Artificial Sequence
  Detection oligonucleotide for Q86SP6
aggttcgagtttgcgg

SEQ ID NO: 854 - DNA, 17 bp, Artificial Sequence
  Detection oligonucleotide for Q86SP6
taggtttgagtttgtgg

SEQ ID NO: 855 - DNA, 16 bp, Artificial Sequence
  Detection oligonucleotide for Q86SP6
tataaagcgcgagtgt

SEQ ID NO: 856 - DNA, 17 bp, Artificial Sequence
  Detection oligonucleotide for Q86SP6
tataaagtgtgagtgtg

SEQ ID NO: 857 - DNA, 16 bp, Artificial Sequence
  Detection oligonucleotide for RARB
atgtcgagaacgcgag

SEQ ID NO: 858 - DNA, 17 bp, Artificial Sequence
  Detection oligonucleotide for RARB
ggatgttgagaatgtga

SEQ ID NO: 859 - DNA, 16 bp, Artificial Sequence
  Detection oligonucleotide for RARB
agcgattcgagtaggg

SEQ ID NO: 860 - DNA, 16 bp, Artificial Sequence
  Detection oligonucleotide for RARB
agtgatttgagtaggg

SEQ ID NO: 861 - DNA, 16 bp, Artificial Sequence
  Detection oligonucleotide for RARB
tatcgtcggggtagga

SEQ ID NO: 862 - DNA, 16 bp, Artificial Sequence
  Detection oligonucleotide for RARB
tattgttggggtagga

SEQ ID NO: 863 - DNA, 16 bp, Artificial Sequence
  Detection oligonucleotide for RARB
aacgtattcggaaggt

SEQ ID NO: 864 - DNA, 17 bp, Artificial Sequence
  Detection oligonucleotide for RARB
gaatgtatttggaaggt

SEQ ID NO: 865 - DNA, 16 bp, Artificial Sequence
  Detection oligonucleotide for PTGS2
agcgttttcgagagtt

SEQ ID NO: 866 - DNA, 17 bp, Artificial Sequence
  Detection oligonucleotide for PTGS2
gagtgtttttgagagtt

SEQ ID NO: 867 - DNA, 16 bp, Artificial Sequence
  Detection oligonucleotide for PTGS2
ttacgtcgggatagat

SEQ ID NO: 868 - DNA, 16 bp, Artificial Sequence
  Detection oligonucleotide for PTGS2
ggaagttatgttggga

SEQ ID NO: 869 - DNA, 16 bp, Artificial Sequence
  Detection oligonucleotide for PTGS2
tatcgttttaggcgta

SEQ ID NO: 870 - DNA, 19 bp, Artificial Sequence
  Detection oligonucleotide for PTGS2
tttattgttttaggtgtat

SEQ ID NO: 871 - DNA, 17 bp, Artificial Sequence
  Detection oligonucleotide for RASSF1
tacgggtattttcgcgt

SEQ ID NO: 872 - DNA, 18 bp, Artificial Sequence
  Detection oligonucleotide for RASSF1
atatgggtatttttgtgt

SEQ ID NO: 873 - DNA, 16 bp, Artificial Sequence
  Detection oligonucleotide for RASSF1
agagcgcgtttagttt

SEQ ID NO: 874 - DNA, 17 bp, Artificial Sequence
  Detection oligonucleotide for RASSF1
gagagtgtgtttagttt

SEQ ID NO: 875 - DNA, 16 bp, Artificial Sequence
  Detection oligonucleotide for ESR2
taggaacgttcgacgt

SEQ ID NO: 876 - DNA, 18 bp, Artificial Sequence
  Detection oligonucleotide for ESR2
tttaggaatgtttgatgt

SEQ ID NO: 877 - DNA, 16 bp, Artificial Sequence
  Detection oligonucleotide for ESR2
atggcgtttttcgtag

SEQ ID NO: 878 - DNA, 17 bp, Artificial Sequence
  Detection oligonucleotide for ESR2
tagatggtgttttttgt

SEQ ID NO: 879 - DNA, 17 bp, Artificial Sequence
  Detection oligonucleotide for ESR2
ataagcgatttaacgat

SEQ ID NO: 880 - DNA, 19 bp, Artificial Sequence
  Detection oligonucleotide for ESR2
agtgatttaatgataagtt

SEQ ID NO: 881 - DNA, 16 bp, Artificial Sequence
  Detection oligonucleotide for ESR2
atttcgaggattacgt

SEQ ID NO: 882 - DNA, 19 bp, Artificial Sequence
  Detection oligonucleotide for ESR2
atattttgaggattatgtt

SEQ ID NO: 883 - DNA, 17 bp, Artificial Sequence
  Detection oligonucleotide for DRG1
tagtcgttaaaacgtag

SEQ ID NO: 884 - DNA, 19 bp, Artificial Sequence
  Detection oligonucleotide for DRG1
agttgttaaaatgtagatt

SEQ ID NO: 885 - DNA, 17 bp, Artificial Sequence
  Detection oligonucleotide for DRG1
atcgtattggttcgcgg

SEQ ID NO: 886 - DNA, 17 bp, Artificial Sequence
  Detection oligonucleotide for DRG1
attgtattggtttgtgg

SEQ ID NO: 887 - DNA, 16 bp, Artificial Sequence
  Detection oligonucleotide for DRG1
tttacgttttgcgatt

SEQ ID NO: 888 - DNA, 18 bp, Artificial Sequence
  Detection oligonucleotide for DRG1
agttttatgttttgtgat

SEQ ID NO: 889 - DNA, 16 bp, Artificial Sequence
  Detection oligonucleotide for DRG1
atttttacgcggaatt

SEQ ID NO: 890 - DNA, 18 bp, Artificial Sequence
  Detection oligonucleotide for DRG1
gtgatttttatgtggaat

SEQ ID NO: 891 - DNA, 16 bp, Artificial Sequence
  Detection oligonucleotide for DRG1
attcgaagtatcgcgt

SEQ ID NO: 892 - DNA, 18 bp, Artificial Sequence
  Detection oligonucleotide for DRG1
atttgaagtattgtgttt

SEQ ID NO: 893 - DNA, 17 bp, Artificial Sequence
  Detection oligonucleotide for DRG1
atttcgaatttcgagta

SEQ ID NO: 894 - DNA, 18 bp, Artificial Sequence
  Detection oligonucleotide for DRG1
tttgaattttgagtagag

SEQ ID NO: 895 - DNA, 16 bp, Artificial Sequence
  Detection oligonucleotide for DOCK10
tatattgtcggggaga

SEQ ID NO: 896 - DNA, 16 bp, Artificial Sequence
  Detection oligonucleotide for DOCK10
atattgttggggagag

SEQ ID NO: 897 - DNA, 16 bp, Artificial Sequence
  Detection oligonucleotide for BTG4
gtgttgcgtagagata

SEQ ID NO: 898 - DNA, 16 bp, Artificial Sequence
  Detection oligonucleotide for BTG4
ggtgttgtgtagagat

SEQ ID NO: 899 - DNA, 17 bp, Artificial Sequence
  Detection oligonucleotide for BTG4
ttggtttttcggaataa

SEQ ID NO: 900 - DNA, 18 bp, Artificial Sequence
  Detection oligonucleotide for BTG4
ggttttttggaataagat

SEQ ID NO: 901 - DNA, 16 bp, Artificial Sequence
  Detection oligonucleotide for GPR7
attgagggcgtataga

SEQ ID NO: 902 - DNA, 17 bp, Artificial Sequence
  Detection oligonucleotide for GPR7
tgagggtgtatagattt

SEQ ID NO: 903 - DNA, 16 bp, Artificial Sequence
  Detection oligonucleotide for GPR7
ggagatcgaagtttgt

SEQ ID NO: 904 - DNA, 16 bp, Artificial Sequence
  Detection oligonucleotide for GPR7
ggggagattgaagttt

SEQ ID NO: 905 - DNA, 17 bp, Artificial Sequence
  Detection oligonucleotide for ISL1
agattttgcgaaagata

SEQ ID NO: 906 - DNA, 19 bp, Artificial Sequence
  Detection oligonucleotide for ISL1
ttagattttgtgaaagata

SEQ ID NO: 907 - DNA, 19 bp, Artificial Sequence
  Detection oligonucleotide for ISL1
aagatatcgaaattaagtt

SEQ ID NO: 908 - DNA, 20 bp, Artificial Sequence
  Detection oligonucleotide for ISL1
aagatattgaaattaagttt

SEQ ID NO: 909 - DNA, 16 bp, Artificial Sequence
  Detection oligonucleotide for GPRK5
agattttcgagggaga

SEQ ID NO: 910 - DNA, 17 bp, Artificial Sequence
  Detection oligonucleotide for GPRK5
agatttttgagggagat

SEQ ID NO: 911 - DNA, 17 bp, Artificial Sequence
  Detection oligonucleotide for FBN2
aattggtcgttagtttt

SEQ ID NO: 912 - DNA, 18 bp, Artificial Sequence
  Detection oligonucleotide for FBN2
gttaattggttgttagtt

SEQ ID NO: 913 - DNA, 16 bp, Artificial Sequence
  Detection oligonucleotide for FBN2
ttagggatcggatttg

SEQ ID NO: 914 - DNA, 17 bp, Artificial Sequence
  Detection oligonucleotide for FBN2
attagggattggatttg

SEQ ID NO: 915 - DNA, 17 bp, Artificial Sequence
  Detection oligonucleotide for LIMK1
tttaattcgaaagggaa

SEQ ID NO: 916 - DNA, 18 bp, Artificial Sequence
  Detection oligonucleotide for LIMK1
ttaatttgaaagggaaag

SEQ ID NO: 917 - DNA, 16 bp, Artificial Sequence
  Detection oligonucleotide for PSD/Q9H469
aggttagtcgagaagt

SEQ ID NO: 918 - DNA, 17 bp, Artificial Sequence
  Detection oligonucleotide for PSD/Q9H469
aggttagttgagaagta

SEQ ID NO: 919 - DNA, 16 bp, Artificial Sequence
  Detection oligonucleotide for PSD/Q9H469
attgttacgaagtgga

SEQ ID NO: 920 - DNA, 17 bp, Artificial Sequence
  Detection oligonucleotide for PSD/Q9H469
ttgttatgaagtggaag

SEQ ID NO: 921 - DNA, 16 bp, Artificial Sequence
  Detection oligonucleotide for Q96S01
tattgatcggttggag

SEQ ID NO: 922 - DNA, 17 bp, Artificial Sequence
  Detection oligonucleotide for Q96S01
tattgattggttggagg

SEQ ID NO: 923 - DNA, 18 bp, Artificial Sequence
  Detection oligonucleotide for ABHD9
agttagagcgtattattt

SEQ ID NO: 924 - DNA, 20 bp, Artificial Sequence
  Detection oligonucleotide for ABHD9
aatagttagagtgtattatt

SEQ ID NO: 925 - DNA, 16 bp, Artificial Sequence
  Detection oligonucleotide for MLLT3
ttagtggtcggagata

SEQ ID NO: 926 - DNA, 16 bp, Artificial Sequence
  Detection oligonucleotide for MLLT3
agtggttggagataga

SEQ ID NO: 927 - DNA, 17 bp, Artificial Sequence
  Detection oligonucleotide for SOLH
tatatttcgtgagggta

SEQ ID NO: 928 - DNA, 18 bp, Artificial Sequence
  Detection oligonucleotide for SOLH
tatattttgtgagggtag

SEQ ID NO: 929 - DNA, 17 bp, Artificial Sequence
  Detection oligonucleotide for Q9NWV0
atttttacgagaaggtt

SEQ ID NO: 930 - DNA, 18 bp, Artificial Sequence
  Detection oligonucleotide for Q9NWV0
gatttttatgagaaggtt

SEQ ID NO: 931 - DNA, 16 bp, Artificial Sequence
  Detection oligonucleotide for H2AFY2
atgggaatcgtggttt

SEQ ID NO: 932 - DNA, 16 bp, Artificial Sequence
  Detection oligonucleotide for H2AFY2
atgggaattgtggttt

SEQ ID NO: 933 - DNA, 16 bp, Artificial Sequence
  Detection oligonucleotide for RHOC
aggtttacggaaaagg

SEQ ID NO: 934 - DNA, 17 bp, Artificial Sequence
  Detection oligonucleotide for RHOC
aaggtttatggaaaagg

SEQ ID NO: 935 - DNA, 17 bp, Artificial Sequence
  Detection oligonucleotide for KBTBD6
tagagtcgggttttgta

SEQ ID NO: 936 - DNA, 17 bp, Artificial Sequence
  Detection oligonucleotide for KBTBD6
tagagttgggttttgta

SEQ ID NO: 937 - DNA, 16 bp, Artificial Sequence
  Detection oligonucleotide for TRPM4
atgggggtcgagattt

SEQ ID NO: 938 - DNA, 16 bp, Artificial Sequence
  Detection oligonucleotide for TRPM4
atgggggttgagattt

SEQ ID NO: 939 - DNA, 16 bp, Artificial Sequence
  Detection oligonucleotide for TCEB3BP1
ggtagtcggtattagg

SEQ ID NO: 940 - DNA, 17 bp, Artificial Sequence
  Detection oligonucleotide for TCEB3BP1
tggtagttggtattagg

SEQ ID NO: 941 - DNA, 16 bp, Artificial Sequence
  Detection oligonucleotide for TCEB3BP1
tgtagtcgaaggttag

SEQ ID NO: 942 - DNA, 17 bp, Artificial Sequence
  Detection oligonucleotide for TCEB3BP1
tgtagttgaaggttagt

SEQ ID NO: 943 - DNA, 18 bp, Artificial Sequence
  Detection oligonucleotide for Q8NCX8
ggagtttattcggtttat

SEQ ID NO: 944 - DNA, 19 bp, Artificial Sequence
  Detection oligonucleotide for Q8NCX8
ggagtttatttggtttata

SEQ ID NO: 945 - DNA, 18 bp, Artificial Sequence
  Detection oligonucleotide for WDFY3
aattgtagtcgtttagtt

SEQ ID NO: 946 - DNA, 19 bp, Artificial Sequence
  Detection oligonucleotide for WDFY3
aaattgtagttgtttagtt

SEQ ID NO: 947 - DNA, 18 bp, Artificial Sequence
  Detection oligonucleotide for ZNF566
tattttttcggtagagat

SEQ ID NO: 948 - DNA, 18 bp, Artificial Sequence
  Detection oligonucleotide for ZNF566
tttttttggtagagattg

SEQ ID NO: 949 - DNA, 16 bp, Artificial Sequence
  Detection oligonucleotide for ZNF566
atgggttgcgtttata

SEQ ID NO: 950 - DNA, 17 bp, Artificial Sequence
  Detection oligonucleotide for ZNF566
tgggttgtgtttataag

SEQ ID NO: 951 - DNA, 16 bp, Artificial Sequence
  Detection oligonucleotide for SEQ ID NO: 61
tttagggcgaggttat

SEQ ID NO: 952 - DNA, 17 bp, Artificial Sequence
  Detection oligonucleotide for SEQ ID NO: 61
tttagggtgaggttatt

SEQ ID NO: 953 - DNA, 17 bp, Artificial Sequence
  Detection oligonucleotide for SEQ ID NO: 61
tgtatatttcgtagggt

SEQ ID NO: 954 - DNA, 18 bp, Artificial Sequence
  Detection oligonucleotide for SEQ ID NO: 61
ttgtatattttgtagggt

SEQ ID NO: 955 - DNA, 16 bp, Artificial Sequence
  Detection oligonucleotide for PTGS2
atttgagcggttttga

SEQ ID NO: 956 - DNA, 17 bp, Artificial Sequence
  Detection oligonucleotide for PTGS2
aatttgagtggttttga

SEQ ID NO: 957 - DNA, 17 bp, Artificial Sequence
  Detection oligonucleotide for RASSF1
agtaaatcggattagga

SEQ ID NO: 958 - DNA, 18 bp, Artificial Sequence
  Detection oligonucleotide for RASSF1
agtaaattggattaggag

SEQ ID NO: 959 - DNA, 17 bp, Artificial Sequence
  Detection oligonucleotide for DRG1
tgtatgaacgtgtagtt

SEQ ID NO: 960 - DNA, 17 bp, Artificial Sequence
  Detection oligonucleotide for DRG1
gtgtatgaatgtgtagt

SEQ ID NO: 961 - DNA, 28536 bp, Homo Sapiens
gctctgggagctaggtttctctcgctggatgggaaaaggaggtgcggaaaggggcaggcggcctgcgggctagcggggatgagagttgtggggagaacggaggagagagtaaaattattccttttggaagtccaagggaagggagctgaggtgagagaaatggcctctcttaggtcccaagtctccgcccccagcctgcaccactcaagtcggggaagtgacaactcttcctaaacctcgacttccattttttgtttcctgcagattgattgatgtcctcgcgttgttctagttcagcaaccaaactaggccgaggtacacctcttttacccagagctcccaaatcactcaccaacctgcaggagacctaaatcctccgggcaggtctcgttagcgcttccagcccccatccccaaatcccctcttctagctccttccttcccctccgccctttggccctccccgccccctaccaggctgagaggcggagaggccgggaccgctgggccctgcggctccagaagccaaagtccgcccgtggggaccgttttcctctccactgctctcaagtgaacaacatggtgggaggtgaccctcgtccaaagggcttttatctgccccccactgctgcgtgatccctccgcaagtcggaggcagagctttaaaaagaaagaaagtgtgcgttgagcactgatcttaaatcggggacattatctgcgatctctttaagtggcagcagcagtttcttgcagaacaaagactcagtgttcgagctccaaaagcttctaggtaaagtttcattcagatgaaagcaactaaggcgaaaaaacaatgatattgtcggctccagaaaatcggcggttactttttgctctaagttccccagcgtggtgtttgttctcgcccactttggttgtgcggggggttgacaagcataacaaaagatctcagcacatccctccccccacctccacaacgaccctcctagcgccatgaggatgaattctctgggactaagtggtatttgtttctatttgttatgaaatcaaatttcacatttttttaaagctgaaaatcgcggataaagaaggatcgggtgcttaaagttcatttaaacactcacaccgaactcattccctgtttagatgtcagaggatggcagggagggccagggctgtaattcatcttgatttgcttcattgtcctgcagtttgcaaactataatcctgtataatttcaggaacaagcaggtttagaattaatgggtcaatattatttaaaacaaaacaccgggagcatgacctttgcctcaactacatattgctcgacaagactcaggaaactccactctaacctctcaacccctgagttctttgagaaactgaagggctgtagttattagaaatcatctttgtttcttttaatgtctccaaaggatttggaaatagtaatgcaatataacatgaaggatctctctacttaagcctgaagataaacgtggaagcctaaatattttgaactggagatgtttccctgtaaatttattatagatgtattcctcctgagagaaatgcatataaactatacatgtatacatgcacaaatatttctccagaacaatttgctagaggtgtaggtttccccgtaaaggagtaaacttgagagtcattttaagctgatggacttgctaaatttctttcttcttttttctttttcatattatttgctagccataatggaatcctctaggtttaagccaaagaaaaattggagagacaaaattagattttgtagcccttttcccccccgggaatgcctttttttttctttttagtttctgatgaatggctatcatttatttctaccaaatttaaataaggactgctgccttgtatgtttaactaggcaggcagagggaactggtttgtttaggaagcagtgactgagatgtcctggccaagttagtgacagaggaggggagaaagaatccagaccaatttgtatgcagtatattttactcccatgaaataaaacacatttgtttcatatttgctgaaaagtaaaacaataatattgtacgaaatgttatacacagggtaggttgtacatagcagtttcagaaacatcattgcatccaccagagaaactattctaaaactgatattcacacattttttataataataataatatgttagaaacatacagtgtggcatttagtatatacactcccttgctcgcaagcgaaaaatcctaatcgcttctgtataacatgctttattttaaagcctaacctttaaaaacactgttgtgatattactaacaactgcttttataaaattaatttgacatttcgatatatatacatcctttcagtcatttaaatgttaacaatgctaaacttaaaaaataacaagcttatagtaatgttaaaatgtcatatccagtcaaacatttgtttgtgtatgtgtccttgcaactgttagaaatacttgtagtgaaagatgtcagacactgaggacatccctttgaaatcaaaggagctctctctttgattcagtggtttccttttctctatatagcttctctttctctccctttctttagtgcccacgaccttctagcataattcccagtctttcaagggcggagttgccccatccggcaaggtcctaggatcccggcgctgtgggtgcggctcacacgggccggtccactgcatactggcaagcactcaggttggaggccgggttctgcacgctggcgtagccgaagctggagtgctgctttgctttcagtctcaggctggccaggctcgagttacacgtgtccctataaacatacggaggagtcggcggcgcgtaaggacaggcaggcgtcggcaccgcggaattcagcgacgggctactcaggttgttcaagttattcaggctgttgagactggagcccgggacgcctgtcactgctgagggcaccatgctggacgacatgctcatggacgagatagagttgggtggggaaaacatgctctgtgatgacagggggttgacgttcatagagttgaagaaggggaagctcttggtggatagggaggcggatgtaaggcccttggcggcccagttgttgtaggaatagcctgggtacatgtcgtcgtagggctgcatgagcccattgaactgcggcccgaagccattcttgcatagctcggcctgctggttgcgctccctctttctccatttggcccgacgattcttgaaccaaacctgggggcggttggggcaagggagcaaacagatgccacagtgcagattactaaaacttccatcggaggccaacccccgccttcccccgacacacacgctagcgcactcacacaccctggcctcgcttcactgcaccgccctgcacaccaagataccagggccagctttcagttactggcccgggtctccaccaagcgcaggagacctggtctgctctggcctgcgagctgggactcggagctacgccacaaacctcagccgaacgcatggagacctgcggacggtttgatcactcagccaggcgtttctccaggtccaaaaacacttaatgtaaaacaaacgcggggcagcaggcttttccaacccttcccggggcaccttgcaaacttgcttccattccaaagccacagacccacggatgaggagaaggggctggaagggcactagaggatcgctctttctcccacgcaattcctcccttccttccctgacctccactgtcgtcccccaccccctggtacgtgctcccttaacagggactaggccgccaacactctttctcgcctagcaaaacaaccaaataaagagcaaaagaccacctcttcgtcagctcgttaactccaggagcttggcatattaaactccgggaacccggaaagggtagttttggagattcccccttctttcgctctgcctcttctttaccctaagcccaccacaggcctgtccgcgcgccaggcccagccgggtcgtttggctttgcaggcggccacccaggccggccggcttccacccgtgtccggtggcccagccgcaaccccgatcccaatccacatcgggcctccctgtcgccccagacggcggcttttgtgtattggagagaggcctggcctgagatatccgagctgacaccagtgatgtttcacattacacatctccgccgggcccagccgtgtaatccgctttttctctttttcctttcattcttgatttcctttttatcccccttcctctttgcacccgactgctataaaaagcacgcctcactcccacttggctcgacaagcagccgccctggaaggagaggcagctgcaaggagagcccagcgccgcggctacaaagcactagggtggagctgcggaatagcgggcggggtgggagggcgttttcgaaggatcccagaaaacccatagactctgtctttaattacttgccatttctaccctaggccatctaaactttgctcaggcgagaagagtacgtgagaggcccgttcccttgatgtgcaagagagctaatgaaagactgaccttgctcaaaaccacgccgcccaggacccagctctggctctggacagttaaactaaaaccattttcaacttcttcccggccttttatccaccagcatagcctcatgccttgcacaaatgccacccagagagtgtcttcattccctctgatttgggagagcattttggtctttattctttttatcgttgttttcttctttttgtttgctctgctctaaccgggggctttattttttctacccagagcacttaattttttttttttaacagcaaagcctctggatgccgcttgatttgcttgattctgttttctgcttccagaatcctaacaaatttggaatcttccaccgaccagcataaaccaggacgttgctattgggttatttatttgagctcatttttgccaatccataaagtacagatttgctacaaagttaaggtaagccctttttacaaaactatgattataatttagaagagggggtgtgagtttcaatttccagagttcaactcctgagagaagataaataaaccaagcagaaaagtctttcttctttttttctttctccttctaagaggactagtagttgtgtattaaaactttgctcccggagatcacaaaactaggaaatagggtgtgtgggagagacctgaatggccgaaacaaccgtaaagaaggtgtaagaagcgcgagcccaggagggaaaaagctgggccagggccgggacaaaggtttcccagggagggccaactcttccgtgtctctggcgggttttccttgttaaaggctcacaggttggagcctgttcgcggctcttggcctggtagggattttattagctctgctctggcaactgcaagccaggaacacaatgtcctgtgcaggggattgcccatgcagcccagctcgtgagatcgcgggatggcggggcagtgagccggtgccgctctgggagcctgagccagggcggcagtcctgtcggcctcggagagggaactgtaatctcgcaaccaggccgccgcgaggccttctgcctttgcaaagctgcgccccaccggcgccctcccaggcggcgctgccttccacattctctcctggtctacttggcctgtacctccacaacatcctccccccatccctcccagactccgtgctggctcctacccggactcgggcttccgtaaggttggtccacacagcgatttcttcgcgtgtggacatgtccgggtagcggttcctctggaaagtggcctccagctcctggagctgctggctggtaaagtgagtccgctgccgcctttgccgcttcttcttagacgggtcctcggcgcccacgtcctcattcttcccctgctggcttttatctttctctgaaaacgaaacacacacactttcccgtcagcatgcccacctgcaacgcggacgccaactggaccggcggcagaagccgtggaagagctgggctgcctggcgccggaggagggtgcgcgcggcggctccgggccgcgaggagcgctgcgcctgtggggtgtgcaggcgcaagtgtgggtgtccgcgccccatttcctcccctcccccagcgccgcacgttttatttacatgtttatctcactgcagcggcacattcacttttatagcctgtgctttcaagtatatttatacacctctgcgcagacacaccaaatctcctgggacgcgcacacgcgcgtggtttacagacccccctccccctcgcagaaagctcagatttccatgcggtttgggaaggctaggaaaagatgtggggattcggttgggcaccgaagttcgccggccctttcccaaaaaaaaaaaaaaaatgcctcttcgcgaagggcatttctgagtggtttcaggcaatttcctaacgagtggagctcctcgggagctgaaagccgagaggaaaacagggacagaggtcggcggcctctgaaggtcctcgaatcaagatgctgggatttttgtgacccaggaaacagaagggaggccagggtacgaatagagagggcggcagaattgctcgcgcccttagcgccccaggagccgggccggtcgagggagaactaaagggatgcggggtagtcaaaattccggctcccggaagttctgcggggagccaggcgaacgaccactcccaccacgcctccccccggaggggctgacttccttggggcgagagggagcgggtggcgcagagcagctgagcgggaatgtctgcagggcggcgcggcgccttacctgcggcctccgggctggaggtgtcggagatggtgtgcacctccagcctgtgcttggaggagtccagcgaccggggctgaccgggagccagaaccgaagccatggctaacggctggggatggtgacaggaagatgaggagacggccgacagcttggtccccgctgctcggtgctccaagtgaagcgggcctttcatgcagttcatggacgagggagcgcgacgctctactagtccttggctactgccccgccgagcccccgtagccgccgctgcccgctccgggtcgcgctctaggcgcggagtttccccgctgcggggagagccaggggacgcaacccccgccgagttctcaagccaagctgcccccgtctcctccggaaggctcaagcgaaaaagtccggagacggaaagtcagcgggcaaacgaagacatgggatgtgggcagaagggcaccactcagagcgtctttagggagcaggcttccaagctccaaagcgaaacaagagtgggcaaagacccccttcttctctccctccctcccccaagaacccctccaataaggaaagctaacgccgaccgcgctctgcccgccccccccccacgcggcagccctgacagagaagtgtcaagagtgacagggacaggtaggtgatattagatcccctgcggcggcagcagccgctgcagccacgacgcggccctctgagcgcaccctccgcaacgcgcacacgcacacccctcgggcggtcgaacaggagccgggccttgccgcagctcagctccaggcacccaggcgagcgacggaccagatctgcggctccgcgcttccctgttggcctaacatcttaaaaccagaggcgggcttcctggtgccgagacgtcactccgccgcggccctccccagccctctccgcctccgcctcctcccagacccttctccgggtgcgactgacgtggctccgcaccaatcaggacgccccgagccgcggtggagggactgtcctgcctgcacctatcagcagtgcggggccgggctactgcctcgccgtgcgcactgggtctacacaggcaagctcccgggaattcagctcctgcccagcccaaggcgatccggcttttagtacgaacccaaaggtgaagagatgaggctaggagtcgaaggcttgggagaagagagtggaatggtcaagaagagaaaggtacaaggatcaacaagacacccactctttgtgtctcactacatccatttccaatcccccaccccatataaaaaggagacacgttacttaaaactagaaaatttgaaaaacagcaacaaatcacctctccgatcttaaattttccaaacagcctgtcaagtgaatgctgcgctaatctgaagaagctttaattgcaaagaagacagagccctgaaaaggcaggctaataaattagaaatcgagaagcaaatggacccgtcaaaagaaaattaccttgactttaaacgaacaactgtttggtggttcactctggatttatacaagaataaaaagtcgcctcagatcacgttctctgtgatgcttattagtccccagacagaaaacacacaatagaagagaaaccctaacccagcgttttcaaaatgctgaaagcttatccattctacttaacgttgattaagacacatatcctagatctttcaaattccttgtacactgtattaagctcgtcctaacccgagagagccacgctttaaattcgactctcttgtttactttattatcaatcagatttaaatccataaagcctgtagaatcaacaaccttgagctaattatatatgaaatatgccttaatgaatttccatacaattaagaatgttgccaaataaccaatttcaaggataatttttaacagtcattttcttttcccagtgagctcaaggctgtcttgagccattaaagtccaagcaggcagaaggggtgtgtgtgagctaagggcgaaaagcctagaactgcgctcaactagcaaaagcaaaaccttatttatataaaacaaaaaaaatcacctttggagacatcaactctttatagcactgtttccaagcaaatttaatttccaaagaaattaaagaaagaaatccaaacatattcaaaataatttttgaaagtccttttgtcccccagcataggtcagctggagaggacaaactaatctcctctgggtttctgcatgggcgattgttttactatggagttagtgttatcatctctgaatgtgtatttgtttgacattacagtcaatgatttgcaatgccagcatgaagtatctttaaaacactccctccttgtccttgttcacaagattgggaaacttattcgatgtggaacaaagtggatgaagcagactacaaatatatttgcaacttatgtgtctctcctttgccctgaccacccccaaaccctatctgcaactcctccccattttaaacttgcagtccaaagacgcacatgagaattgtttttcagtctttcttcaccagtatcatcccactttaagaataatttagctgcaagggaggaatttcttcatagtaagctttaaatcagcatttctgcttttaaccttttattccactttaccccattccacacatacagacacctgctcagagtaaaacacatcctcatgtgacaggtctgcattagctgaggctcatacatccagctatattaggtcctgcaatcttatcactaaattatacacattacactagcagcctgttggtaaagaaggttaaattaatttacattctgctcattatctggtgcttaaatgacgcattttatcccggagatttggcggagaatctccttctcagaccccacagcgtttcactgaagacaatgctcttacatttgtagtggtttttaatctgataagactctaatttgcttaagtcttttaaataagggttttaaatgtttctagccgttttcttattgaatttcctctaattcccccaagatcataaagtatatgtgtaaagtaaatatttcctcccattgcactgccagccgatgacctataactaagtcaataagaatccagctcttttctgctgaatgtgtttactaatcatattccagtttcttcttttaaacctcagaatagctgtggtccccacaataccatgccccttaaagcttcatttcatgaagggactccatcacattaaagaatgaaaaaaatctccactgtagttagtatacacagcccctcactccttgtttttcaagattcaaaccccagagctgcaaatatttttggaagcttgggtgttaatgccttattttagaaagccgagaagccccacagagccatatagatttctaaacccatctctcataaacccacagaattttgataaaagctctggtggctccactctaccgatggaactttcatcacgacaaatatacatgtatgaaggacctcaatcagcctccaaagtggttgaaaaacccaagggcacgtgactgctcctcatagtgccaacgtgtgcgagatgttggaagcactggggatcagcagcagcctagatgcctaaaaagataaggtgtcctaatttgtgtggacccattgaagtcaagtggtgaataaagacaattatctagataattcagattaaagtaaaagcaaaaccatatctatttgtatatatatattcacatccattttatattacagacacacacacgcacacacacactggctctgtaaacaactgactcaaagtgaggattttctttgcatttttccagcaggagtttcaacattctcctaatctcctaatcactttacacactcacagcagcggcgattgggtgacattcttctcaggccccctgtgtggcaggacaccaacatgataagtctgcatggggaaaaggaggtatgtggtgggaactaagaaacactgtccagtgaaaactctgtggcatggtggtggttgattttggagatttaatgtacataagacttgtgggtgcacaggcataggcagcatggatgagaaaggggccagaagaaaataaatcttatgcattttgtgattccagcattactgtgacctctggctaagttcttcttaattggttttagaaattactatgagttcagcctctaacacagaaatttccaatacggagaacattggtgggatcctggtagggaaactagaggtgctgcatggctcacgtggggcaaagaaggaaagcccagtgccggcgtgaggttttgagtctgggagacatcaggggttgtctcgattggggtttcttgcttattctttcaaagaaagaccctagaggagggaaatgtgtgacatggggtcagccgtgttttgtgctggtatttgccaccgattaccagtcttaaagtcttatttaatttcacactcttcagtgttagttgtgcaaagtccctctggccatggcagtgagcggttgggctgtgccgccaaactctccgtatcaatctggcctgggactcaaccaagtgatctctgacttttggaaagagtctgtcttcagagttcacccagaagatggcttaattagacatctccctgagctgttaggccttagacgggtgggagtcctgccctgcccaagctagctcaaggacgaggcccgcctggactcagcttggagccacgtgatgggcgtgagtgtgtgagctcctggtaaggcgcagaggtcagatggagaccttgcatcctgcccgagaagtgccccaccccctccaatatctggcttttctctgcatacaaaccaagctgaaaacagtccactacccaccacccctcatagctatggaaccaaataacccagaaattaaaagcttcactgtagctgtccttttccccatttcctaaatggaatttaaaaagctctggcttgtcaaaaggggaagattattttctgaattggaagtctgtagatatattgagcaacagccaccctctctgggtccctgcaaatggtacccatttttccaacccacagctctagctgctcaaccatttgagatttggggtaactacctgggggaacagtgttcagatggcagtgggagttaccacctcacagtggcctggggaagagaagagaaagagattagaggagggggcatttgctaaaatcactcaacgaacatgctgttaatgcttcctcacatttgcatgttactgccacagttttcctaggtgtcactgagtctccagaaagcaactacttgccgaactaagtaaaataaggagaatggtatagcacatgtgtttggagaaggggaaggaagggtggaatatgaaattgagcatagatatccaggtcaggaaagaaggaagtggcaaggggctaaatgaagtcccacccccccgccacttttttaaacaacagttggattaaacactcatctgtcttcctctttttctcttttcttccctctccagcttatgtccatctcccttttctatttcttttgctctcccttctttctgttttctctctcccagacatgctggtagctaacattcagcattagttgtcatggtgaccataaatcacctaaatccaaaaatacccacctataatctgagatgaagcttttatttccctagcgaaataatattttaaaagctgtcagctgacaaaaaaaaaggaacccacctcattgtagtaacccaagtaatatattacttctaaaggtttaaattaaaatgtcagcctgttaaaaacatgctggtagagtcttggacactcttcccgtcagatcctcacaaagaagttgactctgtcattcctggtcgctctttaacatacacacacaattctgtatgctctctccctttctattaatttcttcctcccctaccaactactttagttctcaaagactctacgcattgggttctaaaagaaaagaatctcctcctggatcagaaaacagcctcattggttgctgaagtgaaagatgtggggtttagggggaaaggttattaggaccataatggcggtggtggtaggaggtcatcctagaggagttaagaagaaaaaaaaatgcagggagaaggactggaggtggaaagacagagtaacagaaaactgagctgggtggtcaggtgctgcggtgaagtctagccccgaaatgataggtatatattctcccactcctgcctttttctcctctgagagaaaactttcctagtcagagaccctggggggtaggaggcgggcaaacgccgctgcagttgggccttttgtcttctaccttgggcttgttgtcttttgcctatcttggattacagggtattcgcctagatgaagagccattaattacccattcagtcaatattaggaagacgacaaagctttttacataggattaagaagacatcagattgttccattagtatattcctgctcacgaataagctttcgttatacatttccttttcccccgagccgctctaacaactgctgcatatattagcagcgggcggtgaggaataacagccgaaccagccttaagaaactttgtgtaccgagtcagcagcgaggaacgcgacctgtgaagaccacttttgcgggcagggatccgcagggactgactactttcggacaactggtacaatttcccctgggggtgaaaaaccacaacgcggcggggcacctttcaagtgagctgcagatttgattggcgcggggggtgggggaggggaggggagaatgggatggcggaggtcgggcggaggaaagaaaatggaaaactctccttacccctatttcgttgctttttcctcaagcctcatgcccccttcggcaagcacctgtcccttccgcgctagccacagctagagttctccacctttctctacacatccccttctttctgacaaggctcaggaccttggtcaccaccccacgcaccaccattttgcgttttgctagagacggtctgggctgatctcgctggtgtccatgttaggattaaaatcccttcatgacggcgaggaaaactgtattatttgctttcagggggtacattaggagtccacgtagtatatgctccgcaaacattcgctgattgaatgagaggcgcgggggcggggcggcggagaggggtctgcggccgccaaggccgccagggttaacccaggtccttcgaagaaggttgggaccgagctgctgccgcgtgtgaaggtgtgtgtcgcggctgggggtgccacaacgggccatggagcccacctcccagagggaggaagtctgtgcacaccagcgacttgggtcgaacactttcagcccatccactgggccaaagctatttaacaattaatgcgttcctgggggaggccgggggaagtacccgccccttgtcgggacgcaaagccaggcgtcaggtccaaaggggctgcagtgcagtccgatttcagcacggaacccagagccgccgccctgaaactttttaagccagtgacagaggagggtcagtccgtcctcctcctgagggtgaagaccattttatgagttcctttcaggacccccaaagcaagaaaagccaaagaaaggtctctttgctctagggggtcgttctcagctggcttctacaccatcttctgctagctgcgtccaccctctctcaaacctctggcttttaggggtctccagtcgctctcgtgctacccccgtttcggggttctatccaggctgggcatccgcccaatggataccaaggagaatgggactcactagggaaggaaggcagagcctggactgcttagaggtggactctgcctatacagaacgtttagtctttaacgaggacatggtatttttgggcggcgttgggggcagaggcggagagggtagcgtaatagactatcacggccttttgaagaagtcatatgtcattgtgaactttttttctctttaaaagcaaagaaaaactttaaaaaaacacaagaaataaatccttttgttttacaagcaggctgtggccaggactttggatattccataagttaacttaaaatcagggaaggataggtgctctatccttcagcagtgctatagctttgcccactcgtgtgatttttttttgtcgtctactagttccttaaaagccaattaaatcaagattttcagcatttcttcccattacatgccttttcttaattaatggcattaaacgtgtttaggcagcaatttttcttttcggtcaaaaagtagaaaaagacatattgagtgtaggggaagagcctttcacgtgcactaaaacaatgcgggcctgaaagtaatggttaagaaagcaatcattcattatttctagttctttatgtgctagttatcaaaagcgaacgaccaggggcgcctgcgcggcttgtgactggcgcaagcagaactcctctgctcttagccgtttcctgctcacctacgaggaccccatcctaccgtaggcttctccacctgtcctcagaatgcattccccatgtctaggaaacctggggtagggactgggggaaggagacattttgcgtctctctggctcccagcacaataagaaatgtcagcctcggcttggcgactgcgagcccgccccgcgcgaagcgagattggggagctcctctagtctggccggagccagggctgagcccgcgcaaagcattctccccagaagtcatcgctgctcttgatttttaaccatatcccaaacatactacggtctaataatttatttttactaccgattatcaaacagaagaagaatttaacacaatctaaatgacagaaatcacgcgacgttatctctgcattgcccccatttaaccccatggggttaatcccggacaagtgagcgtttaactggcccagcagggcgactggcggtgtagtgcagtgtccgggcgtgaagcactggatcgctttagacgcttcatttcaacaaatgatcattttctctcagattcacggggaaactccaatgcaagacctttgttttcttcttagtaatacggtttgtttttttgaccggggtcccaaatcgcccccctccatcccatattacatttgtattcttacactttaatccggaaagagggggttaggggccgagggctgtgggggggggggggctttatctgctcacattatcaaaggtcaatagcctcctaaggctaggcacttatttactacggagccaggaaaatagaggaacagtaaatttgaggggtttttttccatgtatttgaaaagaaaggcatcttccctcctccatcccttacacccccccctccgccccatagaacaagtttcaattcaggaaaggcctgtggcgtaggttggagactttttaactttttacataagcctgtagacctcctctggcaatgtccctcgattcctccagagtgaaaccagccaatcaagcaacgacatcgccaaaacccaaggcctggcaaccagtacttcaggcaggttcgcgtcgacaggggcaaacctccattctaccctgggctgctaagcacagtggctgccctccagctcttcagggatgttgtcggccccccgcccctcccccaaccagccaaagcaaaccttcgccaactcaagtttcccttgcttgcctcccgcgatgaaccgcgcacccacaagtctgggtggggcgtggctgagagcctgagtgactgagtgggccctggtggtgctgcgcgcagcgggatataacgagcgacagaggtcgctgttggaccacttttccacgccagcctagacgccgaggtttgctggagcgtgcgcaggggatcagaccacagggagcgagcgagagggagagagaggtgttgggtctcaggagtgcagtataatttggggaaaggaattaacgtccctgggacggctgcttcccgtcccacccagaggcggagtgtctaagttcaagcagcaggcgcgtcaggtctggcggcctcgccttcttgcgcttcgcccgaggcccagagtcccggaggcgggtgcccagcgcgcggcctgcgcttccctcccggccttaccattggcgccaggatgctgccgcgggaagaacttgctgctggctgcctcttttcggctctcaggagagtccgtgaactcgacctttttgatttcggagtctttggagaagagacattcaacggccgccggctgcacgcctgggccacgcgcgcgcccgccccacgtgcggagagaggcgtcccggaccgcggccgaaaggagccggggacgggaggagggggaggggcgaggcaggccggaggagaaagagggacaaagagcaaagacccagttagaggaaagagctgacggcatccccgtcccccggaccctctggcaacccggggcaggatggcgtactctttctgcgcctccccggttgccggcggttccagccgggaggagtaggctggggggcttcggtacacagcgcgccgctgcttcctagtccaccgccccgccacagggagaggccactggcgatttggttctgatttccttcctgcccaggctggcccctcggggaagcgcccctcgctggggcctcgccgcagggccagtgccctcttgccgccctcacgtggcgcggcctcccgtccgatgacccgggcaggagaagggggttcttacctaattgcacacacgccgacaccagtttgcggcagttggtctccattccccgttatctgcaaaacagaagagaaggaaggctgtaagaagcggcggccgtcgagtgagcagggctcagatgagactacgttacactagctgttaggcgcctactgtgtgctaggcttcaggcgtgtttttccgacctgacagcctctggctgtgcagcagcatctccagcctagcctcgggcccaggacatttatttatcaagaggggatctccctccagagttgccgcaaaagtgcccagaggttagaggactataaagccacagtgtgctggggaggctgtggacctactttcaagaatctcggtgccggggttaagaactcatctgaacgcaatggcagcgggagtgggtgggtggagaggacttttctctttgggaagctgtatgcaaagaccacccttcagtgcttgtccattagttggagctcggtaaacatttgtagaacatcagcgccaacgtgcccctgtcctagacagcagtttccctcggttttctgtaattctgaaacgaacgggctcttggcctagggtgtttcaggagcgagctgagttcgggcctctcatccatcaggagccacttttccatatttagccacactttctcctagagatactaacccggccatttatttacttactacaaataattaccctaaagtatgatttaagatcgcagaggagagacactgggtggactgagcgagactgaggagagcagggcaaacgttcttggagggtttactgcccgccaaggacggagaaatagctctggtataactgctacccagttctccccctttctctcccgggcgagccaaatctttttcacgttttcaaccacaacgcagcgagccaagcatttaacgcgctcccccttctctgccacaggcaagccgggagaggtgggtctcgaggggctccaccgggtgggtagaagagccgcggttgctttaaagacaagaaaagaaggtccagggctccctaggccccttcgatctcagcgcctgcctctctccacgctaaccagggtacgccgacgaccggagggcccacttcgcgcgggtgcggggatcggggtgggagcaagcgttgtcgggttggcggaggcacagaggcggggcagggagctgcgggcctgcctctggcctgagtaccgtttccctgcgtctcggcctctcctgaagggagctgggccctggggagcctctggccaaggtcgctgcctacaggaggggctgcccggcgctgtggcgtggggatccagggtggggacggccaggcggttcccccacccgctagcgagaacgcgggcggggactctgccgattcgatccttgtgggcccgtgggcccagaagtagcagtttggcggctccagatttagtgattctgcagtaaaatcacaggattagtccctgattgagatgtctgttcgtgagatattacaaaattcattatcacagctttctactaactcgatatgaagtaacacagatgggattttattagtccagacttcaaatgtttacttatgataatttcggaggaaatttgcatgtcatcatcatttcgataatcttttttttttatatgtctgaactggctgcattattagctggtagccggagcactgcagatggtaactgcaaatagtttttatttatttattttttttaaagaatgaaatatacaaaagaaaaagattgcgttgcttggtgtaaagtcagtcaattattacacattcttccccccacttccccgtgcttcagtgctgaagaccaaacaaagcaatacaaaacaaatcttcaagaactcatagagctccactctaaggactgaaaagaaggtcaaggcgtgttccttagctcactcctacatgtccttgtgacttggagatttattttgcagtcaaaatgagccttgagacttgcatttttatgcttcatttaatgaccaggcctactagaagaactgagtctaaataactggggaagataattttttaaaaagagacctccaattcccgcctgctgatccttaaacttgccctatcaagacaagtcttctgtgagaaatttggctgccagacttcggaactggcttcaatggctaatctcacaaattgagatgggagacttttcctgatgggaggtagttctcacccccaaagttcatgttctagttggaatgtatatgccaaggactcttgttttggccaacttgggttttatattgtgagcacacaaaaagcactacacggctaacggaggacgaggaaccatggcaaagcaggcaggcaagccctaagaaataaaacaatttgctaaaaaataatttctgatgactaccgcaagactgaaagtgcaggaaaaatacagttcgaataatcccagatcctttcacatttccccccttttcatacactttgttaccccataacaaaatctttaatggaaagtttaaaaataaacagcacaggaacatgtgttttaaatgaactaaattgtgaaattagccagtaaattaatttgtagtaagtaattatttaaggaaattaaaatactgctcagttcagttctgtattttaccatgtgtatgcgttctttacaaccaattaatataagtgctttaggaacatttgaagacaaacacgcttaacttaaggaacaaagcacctaaataatttaagtgtaattttgctgagttaaagtaaaacattccacaaatgaagtggctatttaattttttagggaaagtttggttattgaaatgttgtatgctcatgttacatcaacaaaaatcttcaatttattttgcttatgtgctttgttttcttgatattattggtatttgaattttagatggatttctgccaaaatgatattttgtgtgataaaagcatctttagttttgattgatagactaaaacaaatgcaaggaaatttctttaaatcagattaatttttcataaaaatattttagaatgtatgaattctgatatttacatttataatggtaaaagttttttccgtttagtttagtaagacaatactcacacaaaagagtaaaaaaaaatcacaccaccttatgatagtttgatttctaaattgcttaagaaagtaaagtggttaaactggaaaagaggaacatatttcggaggtttagaatcgaaaatttttttcttaatctccagctggaaaataattctctgcatccatttaaagtgtatctcctgaagtgccagattggagttgactggtgatcaatttaaaggagttacaatccaaagaaatggtgagagcttggcatccaggcctggctcccaggtaattcgcttgggcctgagaggtcactaactgccagttaagatggaatctttttcttttcttttttttcccaatggataacaatgggaagggggctaatcttccagtagctgaaactttgtacccagccctttatcttgagaatgctaatccttggcccgaggatttgttcctgcagtgttggcaccgagatttaagggaagatacctcgttttaaatgccagccacggtctggcttccctctcgacttcagcaccctgtagattgttagtgtctgtggcgggggacgaaaggaacagggctttgcaaggtctgtttgccgactgcgttaccttgggcgaaacttagccccaaaagccacaaatcacctacggtgaagattctccgaagtggaacaaatttccagactcgcattatctcacatccctgcgggatagatggcctccacttaccggctaccgggagagagctgctgtctccgcgtcccactgcttcccggggcgatttccagcgagccgagcctccggctgcacggcaagcgcccgaaagccgggcctgagaggactgcagggctcctgagggtgccaagttccgaaggagtccacgggtgcactggggcctccgaaatctagccgccactggcagtttctttctgctcctctccagctttctcgctcggtctcgcactctctctcctctccctccctctcatccctctctcttccctctgctcctactccgtgtggggagtgacgtgacgtcagcagagattccaccaaactccactgcacagtggcgcgcgggcggccggccgagcccggctgcgcggctggcgatccaggagcgagcacagcgcccgggcgagcgccggggggagcgagcaggggcgacgagaaacgaggcaggggagggaagcagatgccagcgggccgaagagtcgggagccggagccgggagagcgaaaggagaggggacctggcggggcacttaggagccaaccgaggagcaggagcacggactcccactgtggaaaggaggaccagaagggaggatgggatggaagagaagaaaaagcaatctgcgccaacccggcagccctaataaatcaaagggggagcgccagggcagcggggagacagaaacgtacttttggggagcaaatcaggacgggctgggaggaagcgacagggaaagtggcccaagagacggaacaaaggacaatgttcatggggttgtttgggacgaggcgtgtggagtgtgggtgtgagcgtgcgtgtgtgaccttctttcaggcctgcagagttgaggaaagaggtcacagcaaagagggactgcggagggaggaaagtgagagaccggtagagggcgggagtggaggtgggcgcggtggggatgggagaggatgagtgaagagaaatctagaagaatggagtgagctagtgggagagggtgggagggccacagccgggagcgaacgagctaggcttgtcagctggggaaggccgggacgctgggcccagcttagctgggacaccgcgcccgaggtcaaggcgggtggaccaggcatgctgagagtgtcggcgcacaggtgggcacggccacgcactgacccagtgttcacgaagggtttgcactggacaaggctcagacgctcatagagtctagaatttcctctgctgtacctacattcaacaagttcaccctgggtcacggatatctcattttttaaaatgacgaggttaaggttcctggcgaggatggtattaaattgcacgggatagaagtgggggtgggggagagagtttccctcaagtccacatttgctcctgcaaagcaaagagtatgtgaaattacagggcatattctcactcgaaaagtgtgccttacttctgaaccctgattttctgatttcttgacttgagcaaagatgtgtattttggtagtgagcagaatattttggctctgtcctgcctctgagtggaaggactataaatataattcgcctggaggaccaggtgtgaaggcttctgccaggcatatgggacaatgttttttcaatctcaagggcatcctgttaatgtatgtttttggaaagtgccggaacacagccattgctcctggattcggattttcccaccaatattaattcctgcttgagagcaaaactcaggcccgctattaaaaagacatctctttggtccctaattgagaataaagttccctctaaaagttgtattgctcttcctaaatcaatataccaatactcgcaattttagaaatatatagtgactcgggagaatgtgcataaaatagatacgtttaaaaaagcttggcgcttaaaactaaccctagtcactatataggtgctgggctttccctacttttgggggctgtctggaacatgttatgtgttttcttgaattactccgtgttttgaattcatttgagttagcagtaaaaacaggcaaacaaacttgctcaatttgttttgagtgctaaatcccttcactttgaaatagctaacagtcgacagatggactcattttatggaaagggttagcctcttcagccacgaagaaaactgattagagatctacattttaagccatttctaacctccacgtaacatccgtgaaaactcaaactttctctctttacccagtggaaactcaaagcagtgttatttaaggggagagaaatgagggggaaaatgcccacgtgctgtttaattgtatttcctctctgactctgagaatttctatttctggtttttgaaatctcgccgaggcaagaaaatcaaatttcttcaacaagtcccacaactgaactctagttacaggacaccggaaagtgcagtccgagaaagacatcttcacctctgcccatcgacgatttttgcagcctccccattcctctgagtaatgggctaataatcctccctttttttcttttcattttgtagagattaagaggcgctcgtagcagaacggccttgccttcagctggtggcgaggataggcaatctcatggaaaagttggaagagaatgagaaaaccaaagacagaaagattcagagatccgcggagagacacagggagagggaagggagttgcgctgaaaagacgcaaagatacgcgcgtgcaactccctcccctttcaggtttcagaggtttgcaaaccagggctgagaggaaggggctcgggaagctcacgttcctctcgccccccttctgtctggagtctcgcccgccagaggctggttaaccccagtcccggccgccgcagacactgcgctgagcttttgggtcctcgccttgcccagcgccagtgcagctgaagtgagcagctggtgggaaatgcaaatggctcctggagaaatagaagatacagaatgattctcattccctcctcgagtgtgtggaaggagctggacatacgtttcacgctcctaatccttcttttacatttttagtcatactcctattaaacaactaattaatgcccagaatcaccagggaatacattaggcatgcaatcgtagaagcagggtgctggggggctacaaaccaccgagctgatttaagacgtggatttcaggtttttcccttgtcaaagcagtaaaggaagagcgggccttggcgactgtatttagattccgattacttcaaattagaagggggtggagggagcgtccaagcaaagcaagcaattctctgccctgcagatgtaaacaagattgtagcatcaaaggtactagctcctttagggctagatcgcctggactgggagcctggggaaggggagacactaaccttacgtatctgtgaatttcaaggatgttacatttttacataaacaactccagtgcggattctctggaatggggggagtaatacccccattctagaatattaaaacattttccccccaaagcgtatatcctttttatttcctcaaaattttgaactatgtctaaagataatagtcttccagtaaactggagcattggaccatttccttcaccctttcctaccgacattttgatgatctgattttaatgtgtggggggcacagggaattaaatacagcccataaaactaagcttagatgaaacagtgctggctaagtgggttcagataatttttaatgagaatctcaattacactcctccccccaatatgttgagacaagtgacagaaccgttagaatggtaatcaaattggaaagctcagggagaacaacaatttcgtgatcaaattggggcaaaaccgtggacaaatgtggggtgacctccgccaactccctgtcacccaagagtcaggatttgggaaaggtacagtattatttcagagcccgctgtgacgggctgtgtgctaccatttactttcttcactctggattatgatctcaaccctggcaagcaatttccccagctccttatctgacaacaagcgagtatgtaaataccaatggctagcgatgtttaactgcctcaaacattattgatttgttggctgttctaaattgtcttcctagtccaggtcttgtttccgaattgtctattctagaggtttgatccatgcctccgatgctacaatacaataattgtttttttaaaaaaggcatttaagatgaaccaattgatttgcatataaattaaaattactatgcgttgccgattccggtgttttataatcatttcgaaattagtacttaaccacttgagctaaaagaatatataaatgcctgtattgactcactaatgaattacccaattaaaacgtccgggcaatgctgggcgctggaaagattgttaaatcaagacatattacaggagggatatgaagattagaaaggtaacagaccaatatctcgcactcaaaacggagtttccggtgattcccagctttaattttggagcaggggtctttctcctctgctgttaaaaagattttgtgcttgtttgtgagtgagtgcattcaagtggaaggaacgctcccacggctacggtggctcaggccctttgctcggaccgggaccttacagttctaacccaggagcgttaaactctggaagactccgggccagccctggaggtgcgtggccccgcaagtcgccaggccaagcttgctttttctgtctgcccctccggcaggctgggcgcgctatggcagtgagctttccgcgcaaacggagagctggaaccaaagctgacatttaatagatatgctaactgagcacttaccttcgtcctgagaataggaataaaaggtagctcttcttaagagaggcggtgcaaaggcacgctataggagttcagaaaaggctggcggcgggaaatctgtagcctgggggctagtcaacatcccctttcatttcaagcacttattgatttgctgttgtcatctttggcgacgcagaaggacacttgaaagaatttctgatggggctctgatctgagaaaggaggtgacctgcccaggctcccaccaaattcttaattaccacatcaactgcttttttttatcccccacccgacctccttccttttgcttattcttaactttttaattattcagaaactcccttacctctcagtggcttcccttctgcagcagttttctattcgaaccttttccccgcctttccgtggtagggcctgtatattgatccctctgacctttggcacatctgggccctctgaaatctctcaatcttttcagatttgaggatggcaggctccaccctctccactgtgtgcacacactcagagatatgaaaacttacacagactgccttcaaacccagggtatctaacagatgttccctttccagttcgtctcttgatctgaaatgcctgcctgattccaacttggataccactctttcttgcccttcctttttcaaagcagtttggacatgtgtgcaagtgagcccagaacagctccacccatattctttaccaaactgtaaataaaagaagaactaatgaagtagattggcatatagattgcatcaagagcccgaatccccagtttctggattccccattcaactctggctgtcatctacattgacagagtcattctaagcagaggcccagagaaacctgcattgtgggacaacaggtaaagccacagtaaaaagtggaataattttaaagtcattttattagaatgtaaattgtatttctgggttttgttcgtaaccacctagttttaatatatacagagttagacaggaaaaaataggtcaacacagttattggtactagagaagacaaattccatgggctcctcagtgaaaagaagatccccaaagtctataatttttgatcatttaatttcatttataattgtgggaatgaataagacaccaactgctttatgtatttcatttacatcaaccaatttgtgtttccatcaaaagcagttatacagaatttcttttaacttctggtagcaagttcagaaaatgaagcttacagccaccctgaactggatacatctcttgagctgaccatttctgtaagtgcaggaatataatattgttcttctatggtctttttgcactcttttagggtttgcaagtccttatcaggtctgacatcactgtttgggtctacattcattacaagcaaatttgattactatgctgattttaaaacagcctatttggccagcataatcttagttttcaaattataaaaaccttttaatatacgaagttcccagtttttacctcctctagctccttgctcattcaaaacttctattttaattggtgtaagtaataataatttgtattactatttgtactccttttacttttttggagattgggctggattccagagagaacaccagcatcaccaccaccacaaacaacaaaatctaaaagtaaagcccttatttgcatgataattggtacttggaatgcttctgacttactcaatgccaccttataaaggtaccttgtaaactttcttggaatttctagcaagagcttgtagtaactggaacaactctctgggaagatatcctctttgatgggctttcagtttctggaggaatagattgagagcaattagggagggaggggacattggaaattggcagctacgtcagctgaaacaagcctgggttcagtaaggtgactgatgttgtggttgattccctaccccgagtttctctttaattggggcactgactcttcccactttgggatcccaaggcactcggtgtgtatgcagattcctcccttgtggtcttcaccatgtggtttcgtagcaggtctctggttcaatgatattttatagtcatagccctcatattcattatcatgatctcaatgtttaggcttttagtgtatttatattaaacctgctttattagtaagctggagcacacaggagagatgggggcaagtaaggactcagcagagctcaaattcagacatgtttaaatggctttgactgtgtaaagtgtggcaatgcttcctgctgccctagctttccactctaagcttcacatgtcctctggctaatgaagtgtgatataggccacatgctaggaataatagtatttgttgagaacaaagtgaactcaggaaacctggtatacacaaaatgcatc

SEQ ID NO: 962 - DNA, 28536 bp, Artificial Sequence
  chemically treated genomic DNA (Homo sapiens)
gttttgggagttaggtttttttcgttggatgggaaaaggaggtgcggaaaggggtaggcggtttgcgggttagcggggatgagagttgtggggagaacggaggagagagtaaaattattttttttggaagtttaagggaagggagttgaggtgagagaaatggttttttttaggttttaagttttcgtttttagtttgtattatttaagtcggggaagtgataattttttttaaatttcgatttttattttttgttttttgtagattgattgatgttttcgcgttgttttagtttagtaattaaattaggtcgaggtatattttttttatttagagtttttaaattatttattaatttgtaggagatttaaatttttcgggtaggtttcgttagcgtttttagtttttatttttaaatttttttttttagttttttttttttttttcgttttttggtttttttcgttttttattaggttgagaggcggagaggtcgggatcgttgggttttgcggttttagaagttaaagttcgttcgtggggatcgtttttttttttattgtttttaagtgaataatatggtgggaggtgattttcgtttaaagggtttttatttgttttttattgttgcgtgattttttcgtaagtcggaggtagagttttaaaaagaaagaaagtgtgcgttgagtattgattttaaatcggggatattatttgcgatttttttaagtggtagtagtagttttttgtagaataaagatttagtgttcgagttttaaaagtttttaggtaaagttttatttagatgaaagtaattaaggcgaaaaaataatgatattgtcggttttagaaaatcggcggttattttttgttttaagttttttagcgtggtgtttgttttcgtttattttggttgtgcggggggttgataagtataataaaagattttagtatatttttttttttatttttataacgatttttttagcgttatgaggatgaattttttgggattaagtggtatttgtttttatttgttatgaaattaaattttatatttttttaaagttgaaaatcgcggataaagaaggatcgggtgtttaaagtttatttaaatatttatatcgaatttattttttgtttagatgttagaggatggtagggagggttagggttgtaatttattttgatttgttttattgttttgtagtttgtaaattataattttgtataattttaggaataagtaggtttagaattaatgggttaatattatttaaaataaaatatcgggagtatgatttttgttttaattatatattgttcgataagatttaggaaattttattttaattttttaatttttgagttttttgagaaattgaagggttgtagttattagaaattatttttgttttttttaatgtttttaaaggatttggaaatagtaatgtaatataatatgaaggatttttttatttaagtttgaagataaacgtggaagtttaaatattttgaattggagatgtttttttgtaaatttattatagatgtattttttttgagagaaatgtatataaattatatatgtatatatgtataaatatttttttagaataatttgttagaggtgtaggttttttcgtaaaggagtaaatttgagagttattttaagttgatggatttgttaaattttttttttttttttttttttttatattatttgttagttataatggaattttttaggtttaagttaaagaaaaattggagagataaaattagattttgtagtttttttttttttcgggaatgtttttttttttttttttagtttttgatgaatggttattatttatttttattaaatttaaataaggattgttgttttgtatgtttaattaggtaggtagagggaattggtttgtttaggaagtagtgattgagatgttttggttaagttagtgatagaggaggggagaaagaatttagattaatttgtatgtagtatattttatttttatgaaataaaatatatttgttttatatttgttgaaaagtaaaataataatattgtacgaaatgttatatatagggtaggttgtatatagtagttttagaaatattattgtatttattagagaaattattttaaaattgatatttatatattttttataataataataatatgttagaaatatatagtgtggtatttagtatatatatttttttgttcgtaagcgaaaaattttaatcgtttttgtataatatgttttattttaaagtttaatttttaaaaatattgttgtgatattattaataattgtttttataaaattaatttgatatttcgatatatatatatttttttagttatttaaatgttaataatgttaaatttaaaaaataataagtttatagtaatgttaaaatgttatatttagttaaatatttgtttgtgtatgtgtttttgtaattgttagaaatatttgtagtgaaagatgttagatattgaggatatttttttgaaattaaaggagttttttttttgatttagtggtttttttttttttatatagtttttttttttttttttttttttagtgtttacgattttttagtataatttttagttttttaagggcggagttgttttattcggtaaggttttaggatttcggcgttgtgggtgcggtttatacgggtcggtttattgtatattggtaagtatttaggttggaggtcgggttttgtacgttggcgtagtcgaagttggagtgttgttttgtttttagttttaggttggttaggttcgagttatacgtgtttttataaatatacggaggagtcggcggcgcgtaaggataggtaggcgtcggtatcgcggaatttagcgacgggttatttaggttgtttaagttatttaggttgttgagattggagttcgggacgtttgttattgttgagggtattatgttggacgatatgtttatggacgagatagagttgggtggggaaaatatgttttgtgatgatagggggttgacgtttatagagttgaagaaggggaagtttttggtggatagggaggcggatgtaaggtttttggcggtttagttgttgtaggaatagtttgggtatatgtcgtcgtagggttgtatgagtttattgaattgcggttcgaagttatttttgtatagttcggtttgttggttgcgttttttttttttttatttggttcgacgatttttgaattaaatttgggggcggttggggtaagggagtaaatagatgttatagtgtagattattaaaatttttatcggaggttaattttcgttttttttcgatatatacgttagcgtatttatatattttggtttcgttttattgtatcgttttgtatattaagatattagggttagtttttagttattggttcgggtttttattaagcgtaggagatttggtttgttttggtttgcgagttgggattcggagttacgttataaattttagtcgaacgtatggagatttgcggacggtttgattatttagttaggcgtttttttaggtttaaaaatatttaatgtaaaataaacgcggggtagtaggtttttttaatttttttcggggtattttgtaaatttgtttttattttaaagttatagatttacggatgaggagaaggggttggaagggtattagaggatcgtttttttttttacgtaattttttttttttttttttgatttttattgtcgttttttattttttggtacgtgtttttttaatagggattaggtcgttaatattttttttcgtttagtaaaataattaaataaagagtaaaagattattttttcgttagttcgttaattttaggagtttggtatattaaatttcgggaattcggaaagggtagttttggagatttttttttttttcgttttgttttttttttattttaagtttattataggtttgttcgcgcgttaggtttagtcgggtcgtttggttttgtaggcggttatttaggtcggtcggtttttattcgtgttcggtggtttagtcgtaatttcgattttaatttatatcgggtttttttgtcgttttagacggcggtttttgtgtattggagagaggtttggtttgagatattcgagttgatattagtgatgttttatattatatattttcgtcgggtttagtcgtgtaattcgttttttttttttttttttttatttttgattttttttttatttttttttttttttgtattcgattgttataaaaagtacgttttatttttatttggttcgataagtagtcgttttggaaggagaggtagttgtaaggagagtttagcgtcgcggttataaagtattagggtggagttgcggaatagcgggcggggtgggagggcgttttcgaaggattttagaaaatttatagattttgtttttaattatttgttatttttattttaggttatttaaattttgtttaggcgagaagagtacgtgagaggttcgtttttttgatgtgtaagagagttaatgaaagattgattttgtttaaaattacgtcgtttaggatttagttttggttttggatagttaaattaaaattatttttaattttttttcggttttttatttattagtatagttttatgttttgtataaatgttatttagagagtgtttttattttttttgatttgggagagtattttggtttttattttttttatcgttgtttttttttttttgtttgttttgttttaatcgggggttttattttttttatttagagtatttaattttttttttttaatagtaaagtttttggatgtcgtttgatttgtttgattttgttttttgtttttagaattttaataaatttggaattttttatcgattagtataaattaggacgttgttattgggttatttatttgagtttatttttgttaatttataaagtatagatttgttataaagttaaggtaagttttttttataaaattatgattataatttagaagagggggtgtgagttttaatttttagagtttaatttttgagagaagataaataaattaagtagaaaagttttttttttttttttttttttttttttaagaggattagtagttgtgtattaaaattttgttttcggagattataaaattaggaaatagggtgtgtgggagagatttgaatggtcgaaataatcgtaaagaaggtgtaagaagcgcgagtttaggagggaaaaagttgggttagggtcgggataaaggttttttagggagggttaattttttcgtgtttttggcgggttttttttgttaaaggtttataggttggagtttgttcgcggtttttggtttggtagggattttattagttttgttttggtaattgtaagttaggaatataatgttttgtgtaggggattgtttatgtagtttagttcgtgagatcgcgggatggcggggtagtgagtcggtgtcgttttgggagtttgagttagggcggtagttttgtcggtttcggagagggaattgtaatttcgtaattaggtcgtcgcgaggttttttgtttttgtaaagttgcgttttatcggcgtttttttaggcggcgttgttttttatatttttttttggtttatttggtttgtatttttataatattttttttttattttttttagatttcgtgttggtttttattcggattcgggttttcgtaaggttggtttatatagcgattttttcgcgtgtggatatgttcgggtagcggtttttttggaaagtggtttttagtttttggagttgttggttggtaaagtgagttcgttgtcgtttttgtcgtttttttttagacgggttttcggcgtttacgtttttattttttttttgttggtttttatttttttttgaaaacgaaatatatatattttttcgttagtatgtttatttgtaacgcggacgttaattggatcggcggtagaagtcgtggaagagttgggttgtttggcgtcggaggagggtgcgcgcggcggtttcgggtcgcgaggagcgttgcgtttgtggggtgtgtaggcgtaagtgtgggtgttcgcgttttattttttttttttttttagcgtcgtacgttttatttatatgtttattttattgtagcggtatatttatttttatagtttgtgtttttaagtatatttatatatttttgcgtagatatattaaattttttgggacgcgtatacgcgcgtggtttatagatttttttttttttcgtagaaagtttagatttttatgcggtttgggaaggttaggaaaagatgtggggattcggttgggtatcgaagttcgtcggtttttttttaaaaaaaaaaaaaaaatgttttttcgcgaagggtatttttgagtggttttaggtaattttttaacgagtggagtttttcgggagttgaaagtcgagaggaaaatagggatagaggtcggcggtttttgaaggttttcgaattaagatgttgggatttttgtgatttaggaaatagaagggaggttagggtacgaatagagagggcggtagaattgttcgcgtttttagcgttttaggagtcgggtcggtcgagggagaattaaagggatgcggggtagttaaaatttcggttttcggaagttttgcggggagttaggcgaacgattatttttattacgttttttttcggaggggttgatttttttggggcgagagggagcgggtggcgtagagtagttgagcgggaatgtttgtagggcggcgcggcgttttatttgcggttttcgggttggaggtgtcggagatggtgtgtatttttagtttgtgtttggaggagtttagcgatcggggttgatcgggagttagaatcgaagttatggttaacggttggggatggtgataggaagatgaggagacggtcgatagtttggttttcgttgttcggtgttttaagtgaagcgggttttttatgtagtttatggacgagggagcgcgacgttttattagtttttggttattgtttcgtcgagttttcgtagtcgtcgttgttcgtttcgggtcgcgttttaggcgcggagttttttcgttgcggggagagttaggggacgtaattttcgtcgagtttttaagttaagttgttttcgtttttttcggaaggtttaagcgaaaaagttcggagacggaaagttagcgggtaaacgaagatatgggatgtgggtagaagggtattatttagagcgtttttagggagtaggtttttaagttttaaagcgaaataagagtgggtaaagatttttttttttttttttttttttttttaagaatttttttaataaggaaagttaacgtcgatcgcgttttgttcgttttttttttacgcggtagttttgatagagaagtgttaagagtgatagggataggtaggtgatattagattttttgcggcggtagtagtcgttgtagttacgacgcggttttttgagcgtatttttcgtaacgcgtatacgtatatttttcgggcggtcgaataggagtcgggttttgtcgtagtttagttttaggtatttaggcgagcgacggattagatttgcggtttcgcgtttttttgttggtttaatattttaaaattagaggcgggttttttggtgtcgagacgttatttcgtcgcggttttttttagtttttttcgttttcgtttttttttagattttttttcgggtgcgattgacgtggtttcgtattaattaggacgtttcgagtcgcggtggagggattgttttgtttgtatttattagtagtgcggggtcgggttattgtttcgtcgtgcgtattgggtttatataggtaagttttcgggaatttagtttttgtttagtttaaggcgattcggtttttagtacgaatttaaaggtgaagagatgaggttaggagtcgaaggtttgggagaagagagtggaatggttaagaagagaaaggtataaggattaataagatatttattttttgtgttttattatatttatttttaattttttattttatataaaaaggagatacgttatttaaaattagaaaatttgaaaaatagtaataaattattttttcgattttaaattttttaaatagtttgttaagtgaatgttgcgttaatttgaagaagttttaattgtaaagaagatagagttttgaaaaggtaggttaataaattagaaatcgagaagtaaatggattcgttaaaagaaaattattttgattttaaacgaataattgtttggtggtttattttggatttatataagaataaaaagtcgttttagattacgttttttgtgatgtttattagtttttagatagaaaatatataatagaagagaaattttaatttagcgtttttaaaatgttgaaagtttatttattttatttaacgttgattaagatatatattttagattttttaaattttttgtatattgtattaagttcgttttaattcgagagagttacgttttaaattcgatttttttgtttattttattattaattagatttaaatttataaagtttgtagaattaataattttgagttaattatatatgaaatatgttttaatgaatttttatataattaagaatgttgttaaataattaattttaaggataatttttaatagttattttttttttttagtgagtttaaggttgttttgagttattaaagtttaagtaggtagaaggggtgtgtgtgagttaagggcgaaaagtttagaattgcgtttaattagtaaaagtaaaattttatttatataaaataaaaaaaattatttttggagatattaattttttatagtattgtttttaagtaaatttaatttttaaagaaattaaagaaagaaatttaaatatatttaaaataatttttgaaagtttttttgttttttagtataggttagttggagaggataaattaattttttttgggtttttgtatgggcgattgttttattatggagttagtgttattatttttgaatgtgtatttgtttgatattatagttaatgatttgtaatgttagtatgaagtatttttaaaatattttttttttgtttttgtttataagattgggaaatttattcgatgtggaataaagtggatgaagtagattataaatatatttgtaatttatgtgttttttttttgttttgattatttttaaattttatttgtaatttttttttattttaaatttgtagtttaaagacgtatatgagaattgttttttagtttttttttattagtattattttattttaagaataatttagttgtaagggaggaatttttttatagtaagttttaaattagtatttttgtttttaattttttattttattttattttattttatatatatagatatttgtttagagtaaaatatatttttatgtgataggtttgtattagttgaggtttatatatttagttatattaggttttgtaattttattattaaattatatatattatattagtagtttgttggtaaagaaggttaaattaatttatattttgtttattatttggtgtttaaatgacgtattttatttcggagatttggcggagaattttttttttagattttatagcgttttattgaagataatgtttttatatttgtagtggtttttaatttgataagattttaatttgtttaagttttttaaataagggttttaaatgtttttagtcgtttttttattgaattttttttaatttttttaagattataaagtatatgtgtaaagtaaatatttttttttattgtattgttagtcgatgatttataattaagttaataagaatttagtttttttttgttgaatgtgtttattaattatattttagtttttttttttaaattttagaatagttgtggtttttataatattatgttttttaaagttttattttatgaagggattttattatattaaagaatgaaaaaaatttttattgtagttagtatatatagttttttattttttgttttttaagatttaaattttagagttgtaaatatttttggaagtttgggtgttaatgttttattttagaaagtcgagaagttttatagagttatatagatttttaaatttattttttataaatttatagaattttgataaaagttttggtggttttattttatcgatggaatttttattacgataaatatatatgtatgaaggattttaattagtttttaaagtggttgaaaaatttaagggtacgtgattgttttttatagtgttaacgtgtgcgagatgttggaagtattggggattagtagtagtttagatgtttaaaaagataaggtgttttaatttgtgtggatttattgaagttaagtggtgaataaagataattatttagataatttagattaaagtaaaagtaaaattatatttatttgtatatatatatttatatttattttatattatagatatatatacgtatatatatattggttttgtaaataattgatttaaagtgaggattttttttgtatttttttagtaggagttttaatatttttttaattttttaattattttatatatttatagtagcggcgattgggtgatattttttttaggttttttgtgtggtaggatattaatatgataagtttgtatggggaaaaggaggtatgtggtgggaattaagaaatattgtttagtgaaaattttgtggtatggtggtggttgattttggagatttaatgtatataagatttgtgggtgtataggtataggtagtatggatgagaaaggggttagaagaaaataaattttatgtattttgtgattttagtattattgtgatttttggttaagttttttttaattggttttagaaattattatgagtttagtttttaatatagaaatttttaatacggagaatattggtgggattttggtagggaaattagaggtgttgtatggtttacgtggggtaaagaaggaaagtttagtgtcggcgtgaggttttgagtttgggagatattaggggttgtttcgattggggttttttgtttatttttttaaagaaagattttagaggagggaaatgtgtgatatggggttagtcgtgttttgtgttggtatttgttatcgattattagttttaaagttttatttaattttatattttttagtgttagttgtgtaaagtttttttggttatggtagtgagcggttgggttgtgtcgttaaatttttcgtattaatttggtttgggatttaattaagtgatttttgatttttggaaagagtttgtttttagagtttatttagaagatggtttaattagatatttttttgagttgttaggttttagacgggtgggagttttgttttgtttaagttagtttaaggacgaggttcgtttggatttagtttggagttacgtgatgggcgtgagtgtgtgagtttttggtaaggcgtagaggttagatggagattttgtattttgttcgagaagtgttttattttttttaatatttggtttttttttgtatataaattaagttgaaaatagtttattatttattattttttatagttatggaattaaataatttagaaattaaaagttttattgtagttgtttttttttttattttttaaatggaatttaaaaagttttggtttgttaaaaggggaagattattttttgaattggaagtttgtagatatattgagtaatagttattttttttgggtttttgtaaatggtatttatttttttaatttatagttttagttgtttaattatttgagatttggggtaattatttgggggaatagtgtttagatggtagtgggagttattattttatagtggtttggggaagagaagagaaagagattagaggagggggtatttgttaaaattatttaacgaatatgttgttaatgtttttttatatttgtatgttattgttatagtttttttaggtgttattgagtttttagaaagtaattatttgtcgaattaagtaaaataaggagaatggtatagtatatgtgtttggagaaggggaaggaagggtggaatatgaaattgagtatagatatttaggttaggaaagaaggaagtggtaaggggttaaatgaagttttattttttcgttatttttttaaataatagttggattaaatatttatttgtttttttttttttttttttttttttttttttagtttatgtttattttttttttttattttttttgtttttttttttttttgtttttttttttttagatatgttggtagttaatatttagtattagttgttatggtgattataaattatttaaatttaaaaatatttatttataatttgagatgaagtttttatttttttagcgaaataatattttaaaagttgttagttgataaaaaaaaaggaatttattttattgtagtaatttaagtaatatattatttttaaaggtttaaattaaaatgttagtttgttaaaaatatgttggtagagttttggatatttttttcgttagatttttataaagaagttgattttgttatttttggtcgttttttaatatatatatataattttgtatgttttttttttttttattaattttttttttttttattaattattttagtttttaaagattttacgtattgggttttaaaagaaaagaatttttttttggattagaaaatagttttattggttgttgaagtgaaagatgtggggtttagggggaaaggttattaggattataatggcggtggtggtaggaggttattttagaggagttaagaagaaaaaaaaatgtagggagaaggattggaggtggaaagatagagtaatagaaaattgagttgggtggttaggtgttgcggtgaagtttagtttcgaaatgataggtatatatttttttatttttgttttttttttttttgagagaaaatttttttagttagagattttggggggtaggaggcgggtaaacgtcgttgtagttgggttttttgttttttattttgggtttgttgttttttgtttattttggattatagggtattcgtttagatgaagagttattaattatttatttagttaatattaggaagacgataaagttttttatataggattaagaagatattagattgttttattagtatatttttgtttacgaataagttttcgttatatatttttttttttttcgagtcgttttaataattgttgtatatattagtagcgggcggtgaggaataatagtcgaattagttttaagaaattttgtgtatcgagttagtagcgaggaacgcgatttgtgaagattatttttgcgggtagggattcgtagggattgattattttcggataattggtataattttttttgggggtgaaaaattataacgcggcggggtattttttaagtgagttgtagatttgattggcgcggggggtgggggaggggaggggagaatgggatggcggaggtcgggcggaggaaagaaaatggaaaattttttttatttttatttcgttgttttttttttaagttttatgtttttttcggtaagtatttgtttttttcgcgttagttatagttagagttttttatttttttttatatatttttttttttttgataaggtttaggattttggttattattttacgtattattattttgcgttttgttagagacggtttgggttgatttcgttggtgtttatgttaggattaaaatttttttatgacggcgaggaaaattgtattatttgtttttagggggtatattaggagtttacgtagtatatgtttcgtaaatattcgttgattgaatgagaggcgcgggggcggggcggcggagaggggtttgcggtcgttaaggtcgttagggttaatttaggtttttcgaagaaggttgggatcgagttgttgtcgcgtgtgaaggtgtgtgtcgcggttgggggtgttataacgggttatggagtttattttttagagggaggaagtttgtgtatattagcgatttgggtcgaatatttttagtttatttattgggttaaagttatttaataattaatgcgtttttgggggaggtcgggggaagtattcgttttttgtcgggacgtaaagttaggcgttaggtttaaaggggttgtagtgtagttcgattttagtacggaatttagagtcgtcgttttgaaattttttaagttagtgatagaggagggttagttcgttttttttttgagggtgaagattattttatgagttttttttaggatttttaaagtaagaaaagttaaagaaaggtttttttgttttagggggtcgtttttagttggtttttatattattttttgttagttgcgtttatttttttttaaatttttggtttttaggggtttttagtcgttttcgtgttattttcgtttcggggttttatttaggttgggtattcgtttaatggatattaaggagaatgggatttattagggaaggaaggtagagtttggattgtttagaggtggattttgtttatatagaacgtttagtttttaacgaggatatggtatttttgggcggcgttgggggtagaggcggagagggtagcgtaatagattattacggttttttgaagaagttatatgttattgtgaattttttttttttttaaaagtaaagaaaaattttaaaaaaatataagaaataaatttttttgttttataagtaggttgtggttaggattttggatattttataagttaatttaaaattagggaaggataggtgttttattttttagtagtgttatagttttgtttattcgtgtgatttttttttgtcgtttattagttttttaaaagttaattaaattaagatttttagtatttttttttattatatgtttttttttaattaatggtattaaacgtgtttaggtagtaattttttttttcggttaaaaagtagaaaaagatatattgagtgtaggggaagagttttttacgtgtattaaaataatgcgggtttgaaagtaatggttaagaaagtaattatttattatttttagttttttatgtgttagttattaaaagcgaacgattaggggcgtttgcgcggtttgtgattggcgtaagtagaatttttttgtttttagtcgttttttgtttatttacgaggattttattttatcgtaggtttttttatttgtttttagaatgtattttttatgtttaggaaatttggggtagggattgggggaaggagatattttgcgtttttttggtttttagtataataagaaatgttagtttcggtttggcgattgcgagttcgtttcgcgcgaagcgagattggggagtttttttagtttggtcggagttagggttgagttcgcgtaaagtattttttttagaagttatcgttgtttttgatttttaattatattttaaatatattacggtttaataatttatttttattatcgattattaaatagaagaagaatttaatataatttaaatgatagaaattacgcgacgttatttttgtattgtttttatttaattttatggggttaatttcggataagtgagcgtttaattggtttagtagggcgattggcggtgtagtgtagtgttcgggcgtgaagtattggatcgttttagacgttttattttaataaatgattatttttttttagatttacggggaaattttaatgtaagatttttgttttttttttagtaatacggtttgtttttttgatcggggttttaaatcgtttttttttattttatattatatttgtatttttatattttaattcggaaagagggggttaggggtcgagggttgtgggggggggggggttttatttgtttatattattaaaggttaatagttttttaaggttaggtatttatttattacggagttaggaaaatagaggaatagtaaatttgaggggtttttttttatgtatttgaaaagaaaggtatttttttttttttattttttatattttttttttcgttttatagaataagttttaatttaggaaaggtttgtggcgtaggttggagattttttaattttttatataagtttgtagattttttttggtaatgtttttcgatttttttagagtgaaattagttaattaagtaacgatatcgttaaaatttaaggtttggtaattagtattttaggtaggttcgcgtcgataggggtaaatttttattttattttgggttgttaagtatagtggttgttttttagttttttagggatgttgtcggtttttcgttttttttttaattagttaaagtaaattttcgttaatttaagttttttttgtttgtttttcgcgatgaatcgcgtatttataagtttgggtggggcgtggttgagagtttgagtgattgagtgggttttggtggtgttgcgcgtagcgggatataacgagcgatagaggtcgttgttggattatttttttacgttagtttagacgtcgaggtttgttggagcgtgcgtaggggattagattatagggagcgagcgagagggagagagaggtgttgggttttaggagtgtagtataatttggggaaaggaattaacgtttttgggacggttgtttttcgttttatttagaggcggagtgtttaagtttaagtagtaggcgcgttaggtttggcggtttcgtttttttgcgtttcgttcgaggtttagagtttcggaggcgggtgtttagcgcgcggtttgcgtttttttttcggttttattattggcgttaggatgttgtcgcgggaagaatttgttgttggttgttttttttcggtttttaggagagttcgtgaattcgatttttttgatttcggagtttttggagaagagatatttaacggtcgtcggttgtacgtttgggttacgcgcgcgttcgttttacgtgcggagagaggcgtttcggatcgcggtcgaaaggagtcggggacgggaggagggggaggggcgaggtaggtcggaggagaaagagggataaagagtaaagatttagttagaggaaagagttgacggtattttcgtttttcggattttttggtaattcggggtaggatggcgtattttttttgcgttttttcggttgtcggcggttttagtcgggaggagtaggttggggggtttcggtatatagcgcgtcgttgttttttagtttatcgtttcgttatagggagaggttattggcgatttggttttgattttttttttgtttaggttggtttttcggggaagcgtttttcgttggggtttcgtcgtagggttagtgtttttttgtcgtttttacgtggcgcggtttttcgttcgatgattcgggtaggagaagggggtttttatttaattgtatatacgtcgatattagtttgcggtagttggtttttatttttcgttatttgtaaaatagaagagaaggaaggttgtaagaagcggcggtcgtcgagtgagtagggtttagatgagattacgttatattagttgttaggcgtttattgtgtgttaggttttaggcgtgttttttcgatttgatagtttttggttgtgtagtagtatttttagtttagtttcgggtttaggatatttatttattaagaggggatttttttttagagttgtcgtaaaagtgtttagaggttagaggattataaagttatagtgtgttggggaggttgtggatttatttttaagaatttcggtgtcggggttaagaatttatttgaacgtaatggtagcgggagtgggtgggtggagaggatttttttttttgggaagttgtatgtaaagattattttttagtgtttgtttattagttggagttcggtaaatatttgtagaatattagcgttaacgtgtttttgttttagatagtagtttttttcggttttttgtaattttgaaacgaacgggtttttggtttagggtgttttaggagcgagttgagttcgggttttttatttattaggagttatttttttatatttagttatatttttttttagagatattaattcggttatttatttatttattataaataattattttaaagtatgatttaagatcgtagaggagagatattgggtggattgagcgagattgaggagagtagggtaaacgtttttggagggtttattgttcgttaaggacggagaaatagttttggtataattgttatttagttttttttttttttttttcgggcgagttaaattttttttacgtttttaattataacgtagcgagttaagtatttaacgcgtttttttttttttgttataggtaagtcgggagaggtgggtttcgaggggttttatcgggtgggtagaagagtcgcggttgttttaaagataagaaaagaaggtttagggttttttaggttttttcgattttagcgtttgtttttttttacgttaattagggtacgtcgacgatcggagggtttatttcgcgcgggtgcggggatcggggtgggagtaagcgttgtcgggttggcggaggtatagaggcggggtagggagttgcgggtttgtttttggtttgagtatcgtttttttgcgtttcggttttttttgaagggagttgggttttggggagtttttggttaaggtcgttgtttataggaggggttgttcggcgttgtggcgtggggatttagggtggggacggttaggcggtttttttattcgttagcgagaacgcgggcggggattttgtcgattcgatttttgtgggttcgtgggtttagaagtagtagtttggcggttttagatttagtgattttgtagtaaaattataggattagtttttgattgagatgtttgttcgtgagatattataaaatttattattatagttttttattaattcgatatgaagtaatatagatgggattttattagtttagattttaaatgtttatttatgataatttcggaggaaatttgtatgttattattatttcgataattttttttttttatatgtttgaattggttgtattattagttggtagtcggagtattgtagatggtaattgtaaatagtttttatttatttattttttttaaagaatgaaatatataaaagaaaaagattgcgttgtttggtgtaaagttagttaattattatatatttttttttttattttttcgtgttttagtgttgaagattaaataaagtaatataaaataaatttttaagaatttatagagttttattttaaggattgaaaagaaggttaaggcgtgttttttagtttatttttatatgtttttgtgatttggagatttattttgtagttaaaatgagttttgagatttgtatttttatgttttatttaatgattaggtttattagaagaattgagtttaaataattggggaagataattttttaaaaagagatttttaattttcgtttgttgatttttaaatttgttttattaagataagttttttgtgagaaatttggttgttagatttcggaattggttttaatggttaattttataaattgagatgggagattttttttgatgggaggtagtttttatttttaaagtttatgttttagttggaatgtatatgttaaggatttttgttttggttaatttgggttttatattgtgagtatataaaaagtattatacggttaacggaggacgaggaattatggtaaagtaggtaggtaagttttaagaaataaaataatttgttaaaaaataatttttgatgattatcgtaagattgaaagtgtaggaaaaatatagttcgaataattttagatttttttatattttttttttttttatatattttgttattttataataaaatttttaatggaaagtttaaaaataaatagtataggaatatgtgttttaaatgaattaaattgtgaaattagttagtaaattaatttgtagtaagtaattatttaaggaaattaaaatattgtttagtttagttttgtattttattatgtgtatgcgttttttataattaattaatataagtgttttaggaatatttgaagataaatacgtttaatttaaggaataaagtatttaaataatttaagtgtaattttgttgagttaaagtaaaatattttataaatgaagtggttatttaattttttagggaaagtttggttattgaaatgttgtatgtttatgttatattaataaaaatttttaatttattttgtttatgtgttttgtttttttgatattattggtatttgaattttagatggatttttgttaaaatgatattttgtgtgataaaagtatttttagttttgattgatagattaaaataaatgtaaggaaatttttttaaattagattaattttttataaaaatattttagaatgtatgaattttgatatttatatttataatggtaaaagtttttttcgtttagtttagtaagataatatttatataaaagagtaaaaaaaaattatattattttatgatagtttgatttttaaattgtttaagaaagtaaagtggttaaattggaaaagaggaatatatttcggaggtttagaatcgaaaattttttttttaatttttagttggaaaataattttttgtatttatttaaagtgtattttttgaagtgttagattggagttgattggtgattaatttaaaggagttataatttaaagaaatggtgagagtttggtatttaggtttggtttttaggtaattcgtttgggtttgagaggttattaattgttagttaagatggaattttttttttttttttttttttttaatggataataatgggaagggggttaattttttagtagttgaaattttgtatttagttttttattttgagaatgttaatttttggttcgaggatttgtttttgtagtgttggtatcgagatttaagggaagatatttcgttttaaatgttagttacggtttggtttttttttcgattttagtattttgtagattgttagtgtttgtggcgggggacgaaaggaatagggttttgtaaggtttgtttgtcgattgcgttattttgggcgaaatttagttttaaaagttataaattatttacggtgaagatttttcgaagtggaataaatttttagattcgtattattttatatttttgcgggatagatggtttttatttatcggttatcgggagagagttgttgttttcgcgttttattgtttttcggggcgatttttagcgagtcgagttttcggttgtacggtaagcgttcgaaagtcgggtttgagaggattgtagggtttttgagggtgttaagtttcgaaggagtttacgggtgtattggggttttcgaaatttagtcgttattggtagtttttttttgtttttttttagttttttcgttcggtttcgtattttttttttttttttttttttttattttttttttttttttttgtttttatttcgtgtggggagtgacgtgacgttagtagagattttattaaattttattgtatagtggcgcgcgggcggtcggtcgagttcggttgcgcggttggcgatttaggagcgagtatagcgttcgggcgagcgtcggggggagcgagtaggggcgacgagaaacgaggtaggggagggaagtagatgttagcgggtcgaagagtcgggagtcggagtcgggagagcgaaaggagaggggatttggcggggtatttaggagttaatcgaggagtaggagtacggatttttattgtggaaaggaggattagaagggaggatgggatggaagagaagaaaaagtaatttgcgttaattcggtagttttaataaattaaagggggagcgttagggtagcggggagatagaaacgtatttttggggagtaaattaggacgggttgggaggaagcgatagggaaagtggtttaagagacggaataaaggataatgtttatggggttgtttgggacgaggcgtgtggagtgtgggtgtgagcgtgcgtgtgtgatttttttttaggtttgtagagttgaggaaagaggttatagtaaagagggattgcggagggaggaaagtgagagatcggtagagggcgggagtggaggtgggcgcggtggggatgggagaggatgagtgaagagaaatttagaagaatggagtgagttagtgggagagggtgggagggttatagtcgggagcgaacgagttaggtttgttagttggggaaggtcgggacgttgggtttagtttagttgggatatcgcgttcgaggttaaggcgggtggattaggtatgttgagagtgtcggcgtataggtgggtacggttacgtattgatttagtgtttacgaagggtttgtattggataaggtttagacgtttatagagtttagaattttttttgttgtatttatatttaataagtttattttgggttacggatattttattttttaaaatgacgaggttaaggtttttggcgaggatggtattaaattgtacgggatagaagtgggggtgggggagagagttttttttaagtttatatttgtttttgtaaagtaaagagtatgtgaaattatagggtatatttttattcgaaaagtgtgttttatttttgaattttgattttttgattttttgatttgagtaaagatgtgtattttggtagtgagtagaatattttggttttgttttgtttttgagtggaaggattataaatataattcgtttggaggattaggtgtgaaggtttttgttaggtatatgggataatgtttttttaattttaagggtattttgttaatgtatgtttttggaaagtgtcggaatatagttattgtttttggattcggatttttttattaatattaatttttgtttgagagtaaaatttaggttcgttattaaaaagatatttttttggtttttaattgagaataaagttttttttaaaagttgtattgttttttttaaattaatatattaatattcgtaattttagaaatatatagtgattcgggagaatgtgtataaaatagatacgtttaaaaaagtttggcgtttaaaattaattttagttattatataggtgttgggttttttttatttttgggggttgtttggaatatgttatgtgtttttttgaattatttcgtgttttgaatttatttgagttagtagtaaaaataggtaaataaatttgtttaatttgttttgagtgttaaatttttttattttgaaatagttaatagtcgatagatggatttattttatggaaagggttagtttttttagttacgaagaaaattgattagagatttatattttaagttatttttaatttttacgtaatattcgtgaaaatttaaattttttttttttatttagtggaaatttaaagtagtgttatttaaggggagagaaatgagggggaaaatgtttacgtgttgtttaattgtattttttttttgattttgagaatttttatttttggtttttgaaatttcgtcgaggtaagaaaattaaatttttttaataagttttataattgaattttagttataggatatcggaaagtgtagttcgagaaagatatttttatttttgtttatcgacgatttttgtagtttttttatttttttgagtaatgggttaataattttttttttttttttttttattttgtagagattaagaggcgttcgtagtagaacggttttgtttttagttggtggcgaggataggtaattttatggaaaagttggaagagaatgagaaaattaaagatagaaagatttagagattcgcggagagatatagggagagggaagggagttgcgttgaaaagacgtaaagatacgcgcgtgtaattttttttttttttaggttttagaggtttgtaaattagggttgagaggaaggggttcgggaagtttacgtttttttcgttttttttttgtttggagtttcgttcgttagaggttggttaattttagtttcggtcgtcgtagatattgcgttgagtttttgggttttcgttttgtttagcgttagtgtagttgaagtgagtagttggtgggaaatgtaaatggtttttggagaaatagaagatatagaatgatttttatttttttttcgagtgtgtggaaggagttggatatacgttttacgtttttaattttttttttatatttttagttatatttttattaaataattaattaatgtttagaattattagggaatatattaggtatgtaatcgtagaagtagggtgttggggggttataaattatcgagttgatttaagacgtggattttaggttttttttttgttaaagtagtaaaggaagagcgggttttggcgattgtatttagatttcgattattttaaattagaagggggtggagggagcgtttaagtaaagtaagtaattttttgttttgtagatgtaaataagattgtagtattaaaggtattagtttttttagggttagatcgtttggattgggagtttggggaaggggagatattaattttacgtatttgtgaattttaaggatgttatatttttatataaataattttagtgcggattttttggaatggggggagtaatatttttattttagaatattaaaatattttttttttaaagcgtatattttttttatttttttaaaattttgaattatgtttaaagataatagttttttagtaaattggagtattggattattttttttatttttttttatcgatattttgatgatttgattttaatgtgtggggggtatagggaattaaatatagtttataaaattaagtttagatgaaatagtgttggttaagtgggtttagataatttttaatgagaattttaattatatttttttttttaatatgttgagataagtgatagaatcgttagaatggtaattaaattggaaagtttagggagaataataatttcgtgattaaattggggtaaaatcgtggataaatgtggggtgattttcgttaattttttgttatttaagagttaggatttgggaaaggtatagtattattttagagttcgttgtgacgggttgtgtgttattatttattttttttattttggattatgattttaattttggtaagtaatttttttagttttttatttgataataagcgagtatgtaaatattaatggttagcgatgtttaattgttttaaatattattgatttgttggttgttttaaattgtttttttagtttaggttttgttttcgaattgtttattttagaggtttgatttatgttttcgatgttataatataataattgtttttttaaaaaaggtatttaagatgaattaattgatttgtatataaattaaaattattatgcgttgtcgatttcggtgttttataattatttcgaaattagtatttaattatttgagttaaaagaatatataaatgtttgtattgatttattaatgaattatttaattaaaacgttcgggtaatgttgggcgttggaaagattgttaaattaagatatattataggagggatatgaagattagaaaggtaatagattaatatttcgtatttaaaacggagttttcggtgatttttagttttaattttggagtaggggttttttttttttgttgttaaaaagattttgtgtttgtttgtgagtgagtgtatttaagtggaaggaacgtttttacggttacggtggtttaggttttttgttcggatcgggattttatagttttaatttaggagcgttaaattttggaagatttcgggttagttttggaggtgcgtggtttcgtaagtcgttaggttaagtttgttttttttgtttgttttttcggtaggttgggcgcgttatggtagtgagtttttcgcgtaaacggagagttggaattaaagttgatatttaatagatatgttaattgagtatttattttcgttttgagaataggaataaaaggtagttttttttaagagaggcggtgtaaaggtacgttataggagtttagaaaaggttggcggcgggaaatttgtagtttgggggttagttaatatttttttttattttaagtatttattgatttgttgttgttatttttggcgacgtagaaggatatttgaaagaatttttgatggggttttgatttgagaaaggaggtgatttgtttaggtttttattaaatttttaattattatattaattgtttttttttattttttattcgatttttttttttttgtttatttttaattttttaattatttagaaatttttttattttttagtggttttttttttgtagtagttttttattcgaatttttttttcgttttttcgtggtagggtttgtatattgatttttttgatttttggtatatttgggttttttgaaattttttaatttttttagatttgaggatggtaggttttattttttttattgtgtgtatatatttagagatatgaaaatttatatagattgtttttaaatttagggtatttaatagatgttttttttttagttcgttttttgatttgaaatgtttgtttgattttaatttggatattatttttttttgtttttttttttttaaagtagtttggatatgtgtgtaagtgagtttagaatagttttatttatattttttattaaattgtaaataaaagaagaattaatgaagtagattggtatatagattgtattaagagttcgaatttttagtttttggattttttatttaattttggttgttatttatattgatagagttattttaagtagaggtttagagaaatttgtattgtgggataataggtaaagttatagtaaaaagtggaataattttaaagttattttattagaatgtaaattgtatttttgggttttgttcgtaattatttagttttaatatatatagagttagataggaaaaaataggttaatatagttattggtattagagaagataaattttatgggttttttagtgaaaagaagatttttaaagtttataatttttgattatttaattttatttataattgtgggaatgaataagatattaattgttttatgtattttatttatattaattaatttgtgtttttattaaaagtagttatatagaattttttttaatttttggtagtaagtttagaaaatgaagtttatagttattttgaattggatatattttttgagttgattatttttgtaagtgtaggaatataatattgtttttttatggtttttttgtatttttttagggtttgtaagtttttattaggtttgatattattgtttgggtttatatttattataagtaaatttgattattatgttgattttaaaatagtttatttggttagtataattttagtttttaaattataaaaattttttaatatacgaagtttttagtttttattttttttagttttttgtttatttaaaatttttattttaattggtgtaagtaataataatttgtattattatttgtattttttttatttttttggagattgggttggattttagagagaatattagtattattattattataaataataaaatttaaaagtaaagtttttatttgtatgataattggtatttggaatgtttttgatttatttaatgttattttataaaggtattttgtaaatttttttggaatttttagtaagagtttgtagtaattggaataattttttgggaagatattttttttgatgggtttttagtttttggaggaatagattgagagtaattagggagggaggggatattggaaattggtagttacgttagttgaaataagtttgggtttagtaaggtgattgatgttgtggttgattttttatttcgagtttttttttaattggggtattgattttttttattttgggattttaaggtattcggtgtgtatgtagattttttttttgtggtttttattatgtggtttcgtagtaggtttttggtttaatgatattttatagttatagtttttatatttattattatgattttaatgtttaggtttttagtgtatttatattaaatttgttttattagtaagttggagtatataggagagatgggggtaagtaaggatttagtagagtttaaatttagatatgtttaaatggttttgattgtgtaaagtgtggtaatgttttttgttgttttagttttttattttaagttttatatgttttttggttaatgaagtgtgatataggttatatgttaggaataatagtatttgttgagaataaagtgaatttaggaaatttggtatatataaaatgtatt

SEQ ID NO: 963 - DNA, 28536 bp, Artificial Sequence
  chemically treated genomic DNA (Homo sapiens)
gatgtattttgtgtatattaggttttttgagtttattttgtttttaataaatattattatttttagtatgtggtttatattatattttattagttagaggatatgtgaagtttagagtggaaagttagggtagtaggaagtattgttatattttatatagttaaagttatttaaatatgtttgaatttgagttttgttgagtttttatttgtttttattttttttgtgtgttttagtttattaataaagtaggtttaatataaatatattaaaagtttaaatattgagattatgataatgaatatgagggttatgattataaaatattattgaattagagatttgttacgaaattatatggtgaagattataagggaggaatttgtatatatatcgagtgttttgggattttaaagtgggaagagttagtgttttaattaaagagaaattcggggtagggaattaattataatattagttattttattgaatttaggtttgttttagttgacgtagttgttaatttttaatgttttttttttttttaattgtttttaatttatttttttagaaattgaaagtttattaaagaggatatttttttagagagttgttttagttattataagtttttgttagaaattttaagaaagtttataaggtatttttataaggtggtattgagtaagttagaagtattttaagtattaattattatgtaaataagggttttatttttagattttgttgtttgtggtggtggtgatgttggtgttttttttggaatttagtttaatttttaaaaaagtaaaaggagtataaatagtaatataaattattattatttatattaattaaaatagaagttttgaatgagtaaggagttagaggaggtaaaaattgggaatttcgtatattaaaaggtttttataatttgaaaattaagattatgttggttaaataggttgttttaaaattagtatagtaattaaatttgtttgtaatgaatgtagatttaaatagtgatgttagatttgataaggatttgtaaattttaaaagagtgtaaaaagattatagaagaataatattatatttttgtatttatagaaatggttagtttaagagatgtatttagtttagggtggttgtaagttttattttttgaatttgttattagaagttaaaagaaattttgtataattgtttttgatggaaatataaattggttgatgtaaatgaaatatataaagtagttggtgttttatttatttttataattataaatgaaattaaatgattaaaaattatagattttggggattttttttttattgaggagtttatggaatttgttttttttagtattaataattgtgttgatttatttttttttgtttaattttgtatatattaaaattaggtggttacgaataaaatttagaaatataatttatattttaataaaatgattttaaaattattttattttttattgtggttttatttgttgttttataatgtaggtttttttgggtttttgtttagaatgattttgttaatgtagatgatagttagagttgaatggggaatttagaaattggggattcgggtttttgatgtaatttatatgttaatttattttattagttttttttttatttatagtttggtaaagaatatgggtggagttgttttgggtttatttgtatatatgtttaaattgttttgaaaaaggaagggtaagaaagagtggtatttaagttggaattaggtaggtattttagattaagagacgaattggaaagggaatatttgttagatattttgggtttgaaggtagtttgtgtaagtttttatatttttgagtgtgtgtatatagtggagagggtggagtttgttatttttaaatttgaaaagattgagagattttagagggtttagatgtgttaaaggttagagggattaatatataggttttattacggaaaggcggggaaaaggttcgaatagaaaattgttgtagaagggaagttattgagaggtaagggagtttttgaataattaaaaagttaagaataagtaaaaggaaggaggtcgggtgggggataaaaaaaagtagttgatgtggtaattaagaatttggtgggagtttgggtaggttatttttttttttagattagagttttattagaaatttttttaagtgtttttttgcgtcgttaaagatgataatagtaaattaataagtgtttgaaatgaaaggggatgttgattagtttttaggttatagatttttcgtcgttagttttttttgaatttttatagcgtgtttttgtatcgttttttttaagaagagttattttttatttttatttttaggacgaaggtaagtgtttagttagtatatttattaaatgttagttttggttttagtttttcgtttgcgcggaaagtttattgttatagcgcgtttagtttgtcggaggggtagatagaaaaagtaagtttggtttggcgatttgcggggttacgtatttttagggttggttcggagttttttagagtttaacgtttttgggttagaattgtaaggtttcggttcgagtaaagggtttgagttatcgtagtcgtgggagcgttttttttatttgaatgtatttatttataaataagtataaaatttttttaatagtagaggagaaagatttttgttttaaaattaaagttgggaattatcggaaatttcgttttgagtgcgagatattggtttgttatttttttaatttttatattttttttgtaatatgttttgatttaataatttttttagcgtttagtattgttcggacgttttaattgggtaatttattagtgagttaatataggtatttatatatttttttagtttaagtggttaagtattaatttcgaaatgattataaaatatcggaatcggtaacgtatagtaattttaatttatatgtaaattaattggtttattttaaatgttttttttaaaaaaataattattgtattgtagtatcggaggtatggattaaatttttagaatagataattcggaaataagatttggattaggaagataatttagaatagttaataaattaataatgtttgaggtagttaaatatcgttagttattggtatttatatattcgtttgttgttagataaggagttggggaaattgtttgttagggttgagattataatttagagtgaagaaagtaaatggtagtatatagttcgttatagcgggttttgaaataatattgtattttttttaaattttgatttttgggtgatagggagttggcggaggttattttatatttgtttacggttttgttttaatttgattacgaaattgttgttttttttgagttttttaatttgattattattttaacggttttgttatttgttttaatatattggggggaggagtgtaattgagatttttattaaaaattatttgaatttatttagttagtattgttttatttaagtttagttttatgggttgtatttaattttttgtgttttttatatattaaaattagattattaaaatgtcggtaggaaagggtgaaggaaatggtttaatgttttagtttattggaagattattatttttagatatagtttaaaattttgaggaaataaaaaggatatacgttttggggggaaaatgttttaatattttagaatgggggtattattttttttattttagagaattcgtattggagttgtttatgtaaaaatgtaatatttttgaaatttatagatacgtaaggttagtgtttttttttttttaggtttttagtttaggcgatttagttttaaaggagttagtatttttgatgttataattttgtttatatttgtagggtagagaattgtttgttttgtttggacgttttttttatttttttttaatttgaagtaatcggaatttaaatatagtcgttaaggttcgttttttttttattgttttgataagggaaaaatttgaaatttacgttttaaattagttcggtggtttgtagttttttagtattttgtttttacgattgtatgtttaatgtattttttggtgattttgggtattaattagttgtttaataggagtatgattaaaaatgtaaaagaaggattaggagcgtgaaacgtatgtttagttttttttatatattcgaggagggaatgagaattattttgtattttttatttttttaggagttatttgtattttttattagttgtttattttagttgtattggcgttgggtaaggcgaggatttaaaagtttagcgtagtgtttgcggcggtcgggattggggttaattagtttttggcgggcgagattttagatagaaggggggcgagaggaacgtgagtttttcgagttttttttttttagttttggtttgtaaatttttgaaatttgaaaggggagggagttgtacgcgcgtatttttgcgtttttttagcgtaatttttttttttttttttgtgttttttcgcggatttttgaatttttttgtttttggtttttttatttttttttaatttttttatgagattgtttattttcgttattagttgaaggtaaggtcgttttgttacgagcgttttttaatttttataaaatgaaaagaaaaaaagggaggattattagtttattatttagaggaatggggaggttgtaaaaatcgtcgatgggtagaggtgaagatgtttttttcggattgtatttttcggtgttttgtaattagagtttagttgtgggatttgttgaagaaatttgatttttttgtttcggcgagattttaaaaattagaaatagaaatttttagagttagagaggaaatataattaaatagtacgtgggtatttttttttttatttttttttttttaaataatattgttttgagtttttattgggtaaagagagaaagtttgagtttttacggatgttacgtggaggttagaaatggtttaaaatgtagatttttaattagtttttttcgtggttgaagaggttaattttttttataaaatgagtttatttgtcgattgttagttattttaaagtgaagggatttagtatttaaaataaattgagtaagtttgtttgtttgtttttattgttaatttaaatgaatttaaaatacggagtaatttaagaaaatatataatatgttttagatagtttttaaaagtagggaaagtttagtatttatatagtgattagggttagttttaagcgttaagtttttttaaacgtatttattttatgtatattttttcgagttattatatatttttaaaattgcgagtattggtatattgatttaggaagagtaatataatttttagagggaattttatttttaattagggattaaagagatgtttttttaatagcgggtttgagttttgtttttaagtaggaattaatattggtgggaaaattcgaatttaggagtaatggttgtgtttcggtattttttaaaaatatatattaataggatgtttttgagattgaaaaaatattgttttatatgtttggtagaagtttttatatttggttttttaggcgaattatatttatagtttttttatttagaggtaggatagagttaaaatattttgtttattattaaaatatatatttttgtttaagttaagaaattagaaaattagggtttagaagtaaggtatatttttcgagtgagaatatgttttgtaattttatatattttttgttttgtaggagtaaatgtggatttgagggaaatttttttttttatttttatttttatttcgtgtaatttaatattattttcgttaggaattttaatttcgttattttaaaaaatgagatattcgtgatttagggtgaatttgttgaatgtaggtatagtagaggaaattttagattttatgagcgtttgagttttgtttagtgtaaatttttcgtgaatattgggttagtgcgtggtcgtgtttatttgtgcgtcgatatttttagtatgtttggtttattcgttttgatttcgggcgcggtgttttagttaagttgggtttagcgtttcggttttttttagttgataagtttagttcgttcgttttcggttgtggtttttttatttttttttattagtttattttatttttttagatttttttttatttatttttttttatttttatcgcgtttatttttattttcgttttttatcggttttttattttttttttttcgtagtttttttttgttgtgatttttttttttaattttgtaggtttgaaagaaggttatatacgtacgtttatatttatattttatacgtttcgttttaaataattttatgaatattgttttttgtttcgttttttgggttattttttttgtcgtttttttttagttcgttttgatttgttttttaaaagtacgtttttgttttttcgttgttttggcgttttttttttgatttattagggttgtcgggttggcgtagattgttttttttttttttttattttatttttttttttggtttttttttttatagtgggagttcgtgtttttgtttttcggttggtttttaagtgtttcgttaggtttttttttttttcgttttttcggtttcggttttcgatttttcggttcgttggtatttgttttttttttttgtttcgtttttcgtcgtttttgttcgtttttttcggcgttcgttcgggcgttgtgttcgtttttggatcgttagtcgcgtagtcgggttcggtcggtcgttcgcgcgttattgtgtagtggagtttggtggaatttttgttgacgttacgttattttttatacggagtaggagtagagggaagagagagggatgagagggagggagaggagagagagtgcgagatcgagcgagaaagttggagaggagtagaaagaaattgttagtggcggttagatttcggaggttttagtgtattcgtggattttttcggaatttggtatttttaggagttttgtagtttttttaggttcggttttcgggcgtttgtcgtgtagtcggaggttcggttcgttggaaatcgtttcgggaagtagtgggacgcggagatagtagttttttttcggtagtcggtaagtggaggttatttatttcgtagggatgtgagataatgcgagtttggaaatttgttttatttcggagaatttttatcgtaggtgatttgtggtttttggggttaagtttcgtttaaggtaacgtagtcggtaaatagattttgtaaagttttgtttttttcgtttttcgttatagatattaataatttatagggtgttgaagtcgagagggaagttagatcgtggttggtatttaaaacgaggtatttttttttaaatttcggtgttaatattgtaggaataaattttcgggttaaggattagtatttttaagataaagggttgggtataaagttttagttattggaagattagttttttttttattgttatttattgggaaaaaaaagaaaagaaaaagattttattttaattggtagttagtgattttttaggtttaagcgaattatttgggagttaggtttggatgttaagtttttattatttttttggattgtaatttttttaaattgattattagttaattttaatttggtattttaggagatatattttaaatggatgtagagaattattttttagttggagattaagaaaaaaattttcgattttaaattttcgaaatatgttttttttttttagtttaattattttatttttttaagtaatttagaaattaaattattataaggtggtgtgatttttttttatttttttgtgtgagtattgttttattaaattaaacggaaaaaatttttattattataaatgtaaatattagaatttatatattttaaaatatttttatgaaaaattaatttgatttaaagaaatttttttgtatttgttttagtttattaattaaaattaaagatgtttttattatataaaatattattttggtagaaatttatttaaaatttaaatattaataatattaagaaaataaagtatataagtaaaataaattgaagatttttgttgatgtaatatgagtatataatattttaataattaaattttttttaaaaaattaaatagttattttatttgtggaatgttttattttaatttagtaaaattatatttaaattatttaggtgttttgttttttaagttaagcgtgtttgtttttaaatgtttttaaagtatttatattaattggttgtaaagaacgtatatatatggtaaaatatagaattgaattgagtagtattttaatttttttaaataattatttattataaattaatttattggttaattttataatttagtttatttaaaatatatgtttttgtgttgtttatttttaaattttttattaaagattttgttatggggtaataaagtgtatgaaaaggggggaaatgtgaaaggatttgggattattcgaattgtattttttttgtatttttagttttgcggtagttattagaaattattttttagtaaattgttttattttttagggtttgtttgtttgttttgttatggtttttcgtttttcgttagtcgtgtagtgttttttgtgtgtttataatataaaatttaagttggttaaaataagagtttttggtatatatattttaattagaatatgaattttgggggtgagaattattttttattaggaaaagttttttattttaatttgtgagattagttattgaagttagtttcgaagtttggtagttaaattttttatagaagatttgttttgatagggtaagtttaaggattagtaggcgggaattggaggtttttttttaaaaaattattttttttagttatttagatttagtttttttagtaggtttggttattaaatgaagtataaaaatgtaagttttaaggtttattttgattgtaaaataaatttttaagttataaggatatgtaggagtgagttaaggaatacgttttgattttttttttagtttttagagtggagttttatgagtttttgaagatttgttttgtattgttttgtttggtttttagtattgaagtacggggaagtggggggaagaatgtgtaataattgattgattttatattaagtaacgtaattttttttttttgtatattttattttttaaaaaaaataaataaataaaaattatttgtagttattatttgtagtgtttcggttattagttaataatgtagttagtttagatatataaaaaaaaaagattatcgaaatgatgatgatatgtaaatttttttcgaaattattataagtaaatatttgaagtttggattaataaaattttatttgtgttattttatatcgagttagtagaaagttgtgataatgaattttgtaatattttacgaatagatattttaattagggattaattttgtgattttattgtagaattattaaatttggagtcgttaaattgttatttttgggtttacgggtttataaggatcgaatcggtagagttttcgttcgcgttttcgttagcgggtgggggaatcgtttggtcgtttttattttggatttttacgttatagcgtcgggtagttttttttgtaggtagcgattttggttagaggttttttagggtttagttttttttaggagaggtcgagacgtagggaaacggtatttaggttagaggtaggttcgtagttttttgtttcgtttttgtgttttcgttaattcgataacgtttgtttttatttcgattttcgtattcgcgcgaagtgggtttttcggtcgtcggcgtattttggttagcgtggagagaggtaggcgttgagatcgaaggggtttagggagttttggattttttttttttgtttttaaagtaatcgcggtttttttatttattcggtggagtttttcgagatttatttttttcggtttgtttgtggtagagaagggggagcgcgttaaatgtttggttcgttgcgttgtggttgaaaacgtgaaaaagatttggttcgttcgggagagaaagggggagaattgggtagtagttatattagagttattttttcgtttttggcgggtagtaaattttttaagaacgtttgttttgttttttttagtttcgtttagtttatttagtgttttttttttgcgattttaaattatattttagggtaattatttgtagtaagtaaataaatggtcgggttagtatttttaggagaaagtgtggttaaatatggaaaagtggtttttgatggatgagaggttcgaatttagttcgtttttgaaatattttaggttaagagttcgttcgttttagaattatagaaaatcgagggaaattgttgtttaggataggggtacgttggcgttgatgttttataaatgtttatcgagttttaattaatggataagtattgaagggtggtttttgtatatagttttttaaagagaaaagttttttttatttatttattttcgttgttattgcgtttagatgagtttttaatttcggtatcgagatttttgaaagtaggtttatagtttttttagtatattgtggttttatagttttttaatttttgggtatttttgcggtaattttggagggagatttttttttgataaataaatgttttgggttcgaggttaggttggagatgttgttgtatagttagaggttgttaggtcggaaaaatacgtttgaagtttagtatatagtaggcgtttaatagttagtgtaacgtagttttatttgagttttgtttattcgacggtcgtcgttttttatagtttttttttttttttgttttgtagataacggggaatggagattaattgtcgtaaattggtgtcggcgtgtgtgtaattaggtaagaattttttttttttgttcgggttatcggacgggaggtcgcgttacgtgagggcggtaagagggtattggttttgcggcgaggttttagcgaggggcgttttttcgaggggttagtttgggtaggaaggaaattagaattaaatcgttagtggtttttttttgtggcggggcggtggattaggaagtagcggcgcgttgtgtatcgaagttttttagtttatttttttcggttggaatcgtcggtaatcggggaggcgtagaaagagtacgttattttgtttcgggttgttagagggttcgggggacggggatgtcgttagtttttttttttaattgggtttttgttttttgtttttttttttttttcggtttgtttcgttttttttttttttttcgttttcggtttttttcggtcgcggttcgggacgttttttttcgtacgtggggcgggcgcgcgcgtggtttaggcgtgtagtcggcggtcgttgaatgttttttttttaaagatttcgaaattaaaaaggtcgagtttacggatttttttgagagtcgaaaagaggtagttagtagtaagtttttttcgcggtagtattttggcgttaatggtaaggtcgggagggaagcgtaggtcgcgcgttgggtattcgttttcgggattttgggtttcgggcgaagcgtaagaaggcgaggtcgttagatttgacgcgtttgttgtttgaatttagatatttcgtttttgggtgggacgggaagtagtcgttttagggacgttaatttttttttttaaattatattgtatttttgagatttaatatttttttttttttttcgttcgttttttgtggtttgattttttgcgtacgttttagtaaatttcggcgtttaggttggcgtggaaaagtggtttaatagcgatttttgtcgttcgttatatttcgttgcgcgtagtattattagggtttatttagttatttaggtttttagttacgttttatttagatttgtgggtgcgcggtttatcgcgggaggtaagtaagggaaatttgagttggcgaaggtttgttttggttggttgggggaggggcggggggtcgataatatttttgaagagttggagggtagttattgtgtttagtagtttagggtagaatggaggtttgtttttgtcgacgcgaatttgtttgaagtattggttgttaggttttgggttttggcgatgtcgttgtttgattggttggttttattttggaggaatcgagggatattgttagaggaggtttataggtttatgtaaaaagttaaaaagtttttaatttacgttataggttttttttgaattgaaatttgttttatggggcggaggggggggtgtaagggatggaggagggaagatgtttttttttttaaatatatggaaaaaaattttttaaatttattgtttttttatttttttggtttcgtagtaaataagtgtttagttttaggaggttattgatttttgataatgtgagtagataaagtttttttttttttatagttttcggtttttaatttttttttttcggattaaagtgtaagaatataaatgtaatatgggatggaggggggcgatttgggatttcggttaaaaaaataaatcgtattattaagaagaaaataaaggttttgtattggagttttttcgtgaatttgagagaaaatgattatttgttgaaatgaagcgtttaaagcgatttagtgttttacgttcggatattgtattatatcgttagtcgttttgttgggttagttaaacgtttatttgttcgggattaattttatggggttaaatgggggtaatgtagagataacgtcgcgtgatttttgttatttagattgtgttaaattttttttttgtttgataatcggtagtaaaaataaattattagatcgtagtatgtttgggatatggttaaaaattaagagtagcgatgatttttggggagaatgttttgcgcgggtttagttttggtttcggttagattagaggagttttttaatttcgtttcgcgcggggcgggttcgtagtcgttaagtcgaggttgatattttttattgtgttgggagttagagagacgtaaaatgttttttttttttagtttttattttaggttttttagatatggggaatgtattttgaggataggtggagaagtttacggtaggatggggttttcgtaggtgagtaggaaacggttaagagtagaggagttttgtttgcgttagttataagtcgcgtaggcgtttttggtcgttcgtttttgataattagtatataaagaattagaaataatgaatgattgtttttttaattattatttttaggttcgtattgttttagtgtacgtgaaaggttttttttttatatttaatatgtttttttttattttttgatcgaaaagaaaaattgttgtttaaatacgtttaatgttattaattaagaaaaggtatgtaatgggaagaaatgttgaaaattttgatttaattggtttttaaggaattagtagacgataaaaaaaaattatacgagtgggtaaagttatagtattgttgaaggatagagtatttatttttttttgattttaagttaatttatggaatatttaaagttttggttatagtttgtttgtaaaataaaaggatttattttttgtgtttttttaaagtttttttttgtttttaaagagaaaaaaagtttataatgatatatgatttttttaaaaggtcgtgatagtttattacgttatttttttcgtttttgtttttaacgtcgtttaaaaatattatgttttcgttaaagattaaacgttttgtataggtagagtttatttttaagtagtttaggttttgttttttttttttagtgagttttattttttttggtatttattgggcggatgtttagtttggatagaatttcgaaacgggggtagtacgagagcgattggagatttttaaaagttagaggtttgagagagggtggacgtagttagtagaagatggtgtagaagttagttgagaacgattttttagagtaaagagatttttttttggttttttttgttttgggggttttgaaaggaatttataaaatggtttttatttttaggaggaggacggattgatttttttttgttattggtttaaaaagttttagggcggcggttttgggtttcgtgttgaaatcggattgtattgtagtttttttggatttgacgtttggttttgcgtttcgataaggggcgggtatttttttcggttttttttaggaacgtattaattgttaaatagttttggtttagtggatgggttgaaagtgttcgatttaagtcgttggtgtgtatagattttttttttttgggaggtgggttttatggttcgttgtggtatttttagtcgcgatatatatttttatacgcggtagtagttcggttttaatttttttcgaaggatttgggttaattttggcggttttggcggtcgtagattttttttcgtcgtttcgttttcgcgttttttatttaattagcgaatgtttgcggagtatatattacgtggatttttaatgtattttttgaaagtaaataatatagtttttttcgtcgttatgaagggattttaattttaatatggatattagcgagattagtttagatcgtttttagtaaaacgtaaaatggtggtgcgtggggtggtgattaaggttttgagttttgttagaaagaaggggatgtgtagagaaaggtggagaattttagttgtggttagcgcggaagggataggtgtttgtcgaagggggtatgaggtttgaggaaaaagtaacgaaataggggtaaggagagttttttattttttttttttcgttcgattttcgttattttatttttttttttttttttttatttttcgcgttaattaaatttgtagtttatttgaaaggtgtttcgtcgcgttgtggttttttatttttaggggaaattgtattagttgttcgaaagtagttagtttttgcggatttttgttcgtaaaagtggtttttataggtcgcgtttttcgttgttgattcggtatataaagttttttaaggttggttcggttgttattttttatcgttcgttgttaatatatgtagtagttgttagagcggttcgggggaaaaggaaatgtataacgaaagtttattcgtgagtaggaatatattaatggaataatttgatgtttttttaattttatgtaaaaagttttgtcgtttttttaatattgattgaatgggtaattaatggttttttatttaggcgaatattttgtaatttaagataggtaaaagataataagtttaaggtagaagataaaaggtttaattgtagcggcgtttgttcgttttttattttttagggtttttgattaggaaagtttttttttagaggagaaaaaggtaggagtgggagaatatatatttattatttcggggttagattttatcgtagtatttgattatttagtttagttttttgttattttgtttttttatttttagtttttttttttgtatttttttttttttttaatttttttaggatgattttttattattatcgttattatggttttaataatttttttttttaaattttatattttttattttagtaattaatgaggttgttttttgatttaggaggagattttttttttttagaatttaatgcgtagagtttttgagaattaaagtagttggtaggggaggaagaaattaatagaaagggagagagtatatagaattgtgtgtgtatgttaaagagcgattaggaatgatagagttaatttttttgtgaggatttgacgggaagagtgtttaagattttattagtatgtttttaataggttgatattttaatttaaatttttagaagtaatatattatttgggttattataatgaggtgggtttttttttttttgttagttgatagtttttaaaatattatttcgttagggaaataaaagttttattttagattataggtgggtatttttggatttaggtgatttatggttattatgataattaatgttgaatgttagttattagtatgtttgggagagagaaaatagaaagaagggagagtaaaagaaatagaaaagggagatggatataagttggagagggaagaaaagagaaaaagaggaagatagatgagtgtttaatttaattgttgtttaaaaaagtggcgggggggtgggattttatttagttttttgttattttttttttttttgatttggatatttatgtttaattttatattttatttttttttttttttttttaaatatatgtgttatattattttttttattttatttagttcggtaagtagttgttttttggagatttagtgatatttaggaaaattgtggtagtaatatgtaaatgtgaggaagtattaatagtatgttcgttgagtgattttagtaaatgtttttttttttaatttttttttttttttttttttaggttattgtgaggtggtaatttttattgttatttgaatattgtttttttaggtagttattttaaattttaaatggttgagtagttagagttgtgggttggaaaaatgggtattatttgtagggatttagagagggtggttgttgtttaatatatttatagatttttaatttagaaaataattttttttttttgataagttagagttttttaaattttatttaggaaatggggaaaaggatagttatagtgaagtttttaatttttgggttatttggttttatagttatgaggggtggtgggtagtggattgtttttagtttggtttgtatgtagagaaaagttagatattggagggggtggggtatttttcgggtaggatgtaaggtttttatttgatttttgcgttttattaggagtttatatatttacgtttattacgtggttttaagttgagtttaggcgggtttcgtttttgagttagtttgggtagggtaggatttttattcgtttaaggtttaatagtttagggagatgtttaattaagttattttttgggtgaattttgaagatagattttttttaaaagttagagattatttggttgagttttaggttagattgatacggagagtttggcggtatagtttaatcgtttattgttatggttagagggattttgtataattaatattgaagagtgtgaaattaaataagattttaagattggtaatcggtggtaaatattagtataaaatacggttgattttatgttatatattttttttttttagggtttttttttgaaagaataagtaagaaattttaatcgagataatttttgatgttttttagatttaaaattttacgtcggtattgggttttttttttttgttttacgtgagttatgtagtatttttagtttttttattaggattttattaatgtttttcgtattggaaatttttgtgttagaggttgaatttatagtaatttttaaaattaattaagaagaatttagttagaggttatagtaatgttggaattataaaatgtataagatttatttttttttggttttttttttatttatgttgtttatgtttgtgtatttataagttttatgtatattaaatttttaaaattaattattattatgttatagagtttttattggatagtgttttttagtttttattatatatttttttttttttatgtagatttattatgttggtgttttgttatatagggggtttgagaagaatgttatttaatcgtcgttgttgtgagtgtgtaaagtgattaggagattaggagaatgttgaaatttttgttggaaaaatgtaaagaaaatttttattttgagttagttgtttatagagttagtgtgtgtgtgcgtgtgtgtgtttgtaatataaaatggatgtgaatatatatatataaatagatatggttttgtttttattttaatttgaattatttagataattgtttttatttattatttgattttaatgggtttatataaattaggatattttatttttttaggtatttaggttgttgttgatttttagtgtttttaatatttcgtatacgttggtattatgaggagtagttacgtgtttttgggttttttaattattttggaggttgattgaggttttttatatatgtatatttgtcgtgatgaaagttttatcggtagagtggagttattagagtttttattaaaattttgtgggtttatgagagatgggtttagaaatttatatggttttgtggggtttttcggttttttaaaataaggtattaatatttaagtttttaaaaatatttgtagttttggggtttgaattttgaaaaataaggagtgaggggttgtgtatattaattatagtggagattttttttattttttaatgtgatggagtttttttatgaaatgaagttttaaggggtatggtattgtggggattatagttattttgaggtttaaaagaagaaattggaatatgattagtaaatatatttagtagaaaagagttggatttttattgatttagttataggttatcggttggtagtgtaatgggaggaaatatttattttatatatatattttatgattttgggggaattagaggaaatttaataagaaaacggttagaaatatttaaaatttttatttaaaagatttaagtaaattagagttttattagattaaaaattattataaatgtaagagtattgtttttagtgaaacgttgtggggtttgagaaggagatttttcgttaaattttcgggataaaatgcgttatttaagtattagataatgagtagaatgtaaattaatttaattttttttattaataggttgttagtgtaatgtgtataatttagtgataagattgtaggatttaatatagttggatgtatgagttttagttaatgtagatttgttatatgaggatgtgttttattttgagtaggtgtttgtatgtgtggaatggggtaaagtggaataaaaggttaaaagtagaaatgttgatttaaagtttattatgaagaaattttttttttgtagttaaattatttttaaagtgggatgatattggtgaagaaagattgaaaaataatttttatgtgcgtttttggattgtaagtttaaaatggggaggagttgtagatagggtttgggggtggttagggtaaaggagagatatataagttgtaaatatatttgtagtttgttttatttattttgttttatatcgaataagttttttaattttgtgaataaggataaggagggagtgttttaaagatattttatgttggtattgtaaattattgattgtaatgttaaataaatatatatttagagatgataatattaattttatagtaaaataatcgtttatgtagaaatttagaggagattagtttgttttttttagttgatttatgttgggggataaaaggatttttaaaaattattttgaatatgtttggatttttttttttaatttttttggaaattaaatttgtttggaaatagtgttataaagagttgatgtttttaaaggtgattttttttgttttatataaataaggttttgtttttgttagttgagcgtagttttaggtttttcgtttttagtttatatatattttttttgtttgtttggattttaatggtttaagatagttttgagtttattgggaaaagaaaatgattgttaaaaattatttttgaaattggttatttggtaatatttttaattgtatggaaatttattaaggtatattttatatataattagtttaaggttgttgattttataggttttatggatttaaatttgattgataataaagtaaataagagagtcgaatttaaagcgtggttttttcgggttaggacgagtttaatatagtgtataaggaatttgaaagatttaggatatgtgttttaattaacgttaagtagaatggataagtttttagtattttgaaaacgttgggttagggttttttttttattgtgtgttttttgtttggggattaataagtattatagagaacgtgatttgaggcgattttttatttttgtataaatttagagtgaattattaaatagttgttcgtttaaagttaaggtaatttttttttgacgggtttatttgtttttcgatttttaatttattagtttgtttttttagggttttgttttttttgtaattaaagtttttttagattagcgtagtatttatttgataggttgtttggaaaatttaagatcggagaggtgatttgttgttgttttttaaattttttagttttaagtaacgtgttttttttttatatggggtgggggattggaaatggatgtagtgagatataaagagtgggtgttttgttgatttttgtatttttttttttttgattattttattttttttttttaagttttcgatttttagttttatttttttatttttgggttcgtattaaaagtcggatcgttttgggttgggtaggagttgaattttcgggagtttgtttgtgtagatttagtgcgtacggcgaggtagtagttcggtttcgtattgttgataggtgtaggtaggatagtttttttatcgcggttcggggcgttttgattggtgcggagttacgttagtcgtattcggagaagggtttgggaggaggcggaggcggagagggttggggagggtcgcggcggagtgacgtttcggtattaggaagttcgtttttggttttaagatgttaggttaatagggaagcgcggagtcgtagatttggttcgtcgttcgtttgggtgtttggagttgagttgcggtaaggttcggtttttgttcgatcgttcgaggggtgtgcgtgtgcgcgttgcggagggtgcgtttagagggtcgcgtcgtggttgtagcggttgttgtcgtcgtaggggatttaatattatttatttgtttttgttatttttgatatttttttgttagggttgtcgcgtggggggggggcgggtagagcgcggtcggcgttagttttttttattggaggggtttttgggggagggagggagagaagaagggggtttttgtttatttttgtttcgttttggagtttggaagtttgttttttaaagacgttttgagtggtgtttttttgtttatattttatgttttcgtttgttcgttgatttttcgttttcggattttttcgtttgagtttttcggaggagacgggggtagtttggtttgagaattcggcgggggttgcgttttttggtttttttcgtagcggggaaatttcgcgtttagagcgcgattcggagcgggtagcggcggttacgggggttcggcggggtagtagttaaggattagtagagcgtcgcgttttttcgtttatgaattgtatgaaaggttcgttttatttggagtatcgagtagcggggattaagttgtcggtcgtttttttatttttttgttattatttttagtcgttagttatggtttcggttttggttttcggttagtttcggtcgttggatttttttaagtataggttggaggtgtatattattttcgatatttttagttcggaggtcgtaggtaaggcgtcgcgtcgttttgtagatattttcgtttagttgttttgcgttattcgttttttttcgttttaaggaagttagttttttcggggggaggcgtggtgggagtggtcgttcgtttggtttttcgtagaattttcgggagtcggaattttgattatttcgtatttttttagttttttttcgatcggttcggtttttggggcgttaagggcgcgagtaattttgtcgttttttttattcgtattttggttttttttttgttttttgggttataaaaattttagtattttgattcgaggatttttagaggtcgtcgatttttgtttttgtttttttttcggtttttagttttcgaggagttttattcgttaggaaattgtttgaaattatttagaaatgtttttcgcgaagaggtattttttttttttttttgggaaagggtcggcgaatttcggtgtttaatcgaatttttatatttttttttagtttttttaaatcgtatggaaatttgagttttttgcgagggggaggggggtttgtaaattacgcgcgtgtgcgcgttttaggagatttggtgtgtttgcgtagaggtgtataaatatatttgaaagtataggttataaaagtgaatgtgtcgttgtagtgagataaatatgtaaataaaacgtgcggcgttgggggaggggaggaaatggggcgcggatatttatatttgcgtttgtatattttataggcgtagcgtttttcgcggttcggagtcgtcgcgcgtattttttttcggcgttaggtagtttagtttttttacggtttttgtcgtcggtttagttggcgttcgcgttgtaggtgggtatgttgacgggaaagtgtgtgtgtttcgtttttagagaaagataaaagttagtaggggaagaatgaggacgtgggcgtcgaggattcgtttaagaagaagcggtaaaggcggtagcggatttattttattagttagtagttttaggagttggaggttattttttagaggaatcgttattcggatatgtttatacgcgaagaaatcgttgtgtggattaattttacggaagttcgagttcgggtaggagttagtacggagtttgggagggatggggggaggatgttgtggaggtataggttaagtagattaggagagaatgtggaaggtagcgtcgtttgggagggcgtcggtggggcgtagttttgtaaaggtagaaggtttcgcggcggtttggttgcgagattatagtttttttttcgaggtcgataggattgtcgttttggtttaggtttttagagcggtatcggtttattgtttcgttatttcgcgattttacgagttgggttgtatgggtaattttttgtataggatattgtgtttttggtttgtagttgttagagtagagttaataaaatttttattaggttaagagtcgcgaataggttttaatttgtgagtttttaataaggaaaattcgttagagatacggaagagttggttttttttgggaaatttttgtttcggttttggtttagtttttttttttttgggttcgcgttttttatattttttttacggttgtttcggttatttaggttttttttatatattttattttttagttttgtgattttcgggagtaaagttttaatatataattattagtttttttagaaggagaaagaaaaaaagaagaaagatttttttgtttggtttatttatttttttttaggagttgaattttggaaattgaaatttatatttttttttttaaattataattatagttttgtaaaaagggtttattttaattttgtagtaaatttgtattttatggattggtaaaaatgagtttaaataaataatttaatagtaacgttttggtttatgttggtcggtggaagattttaaatttgttaggattttggaagtagaaaatagaattaagtaaattaagcggtatttagaggttttgttgttaaaaaaaaaaaattaagtgttttgggtagaaaaaataaagttttcggttagagtagagtaaataaaaagaagaaaataacgataaaaagaataaagattaaaatgtttttttaaattagagggaatgaagatattttttgggtggtatttgtgtaaggtatgaggttatgttggtggataaaaggtcgggaagaagttgaaaatggttttagtttaattgtttagagttagagttgggttttgggcggcgtggttttgagtaaggttagttttttattagtttttttgtatattaagggaacgggttttttacgtatttttttcgtttgagtaaagtttagatggtttagggtagaaatggtaagtaattaaagatagagtttatgggttttttgggatttttcgaaaacgtttttttatttcgttcgttatttcgtagttttattttagtgttttgtagtcgcggcgttgggttttttttgtagttgtttttttttttagggcggttgtttgtcgagttaagtgggagtgaggcgtgttttttatagtagtcgggtgtaaagaggaagggggataaaaaggaaattaagaatgaaaggaaaaagagaaaaagcggattatacggttgggttcggcggagatgtgtaatgtgaaatattattggtgttagttcggatattttaggttaggtttttttttaatatataaaagtcgtcgtttggggcgatagggaggttcgatgtggattgggatcggggttgcggttgggttatcggatacgggtggaagtcggtcggtttgggtggtcgtttgtaaagttaaacgattcggttgggtttggcgcgcggataggtttgtggtgggtttagggtaaagaagaggtagagcgaaagaagggggaatttttaaaattatttttttcgggttttcggagtttaatatgttaagtttttggagttaacgagttgacgaagaggtggttttttgttttttatttggttgttttgttaggcgagaaagagtgttggcggtttagtttttgttaagggagtacgtattagggggtgggggacgatagtggaggttagggaaggaagggaggaattgcgtgggagaaagagcgattttttagtgtttttttagttttttttttttattcgtgggtttgtggttttggaatggaagtaagtttgtaaggtgtttcgggaagggttggaaaagtttgttgtttcgcgtttgttttatattaagtgtttttggatttggagaaacgtttggttgagtgattaaatcgttcgtaggtttttatgcgttcggttgaggtttgtggcgtagtttcgagttttagttcgtaggttagagtagattaggttttttgcgtttggtggagattcgggttagtaattgaaagttggttttggtattttggtgtgtagggcggtgtagtgaagcgaggttagggtgtgtgagtgcgttagcgtgtgtgtcgggggaaggcgggggttggttttcgatggaagttttagtaatttgtattgtggtatttgtttgtttttttgttttaatcgtttttaggtttggtttaagaatcgtcgggttaaatggagaaagagggagcgtaattagtaggtcgagttatgtaagaatggtttcgggtcgtagtttaatgggtttatgtagttttacgacgatatgtatttaggttatttttataataattgggtcgttaagggttttatattcgtttttttatttattaagagtttttttttttttaattttatgaacgttaattttttgttattatagagtatgttttttttatttaattttatttcgtttatgagtatgtcgtttagtatggtgtttttagtagtgataggcgtttcgggttttagttttaatagtttgaataatttgaataatttgagtagttcgtcgttgaatttcgcggtgtcgacgtttgtttgtttttacgcgtcgtcgattttttcgtatgtttatagggatacgtgtaattcgagtttggttagtttgagattgaaagtaaagtagtattttagtttcggttacgttagcgtgtagaattcggtttttaatttgagtgtttgttagtatgtagtggatcggttcgtgtgagtcgtatttatagcgtcgggattttaggattttgtcggatggggtaatttcgtttttgaaagattgggaattatgttagaaggtcgtgggtattaaagaaagggagagaaagagaagttatatagagaaaaggaaattattgaattaaagagagagtttttttgattttaaagggatgtttttagtgtttgatattttttattataagtatttttaatagttgtaaggatatatatataaataaatgtttgattggatatgatattttaatattattataagtttgttattttttaagtttagtattgttaatatttaaatgattgaaaggatgtatatatatcgaaatgttaaattaattttataaaagtagttgttagtaatattataatagtgtttttaaaggttaggttttaaaataaagtatgttatatagaagcgattaggatttttcgtttgcgagtaagggagtgtatatattaaatgttatattgtatgtttttaatatattattattattataaaaaatgtgtgaatattagttttagaatagtttttttggtggatgtaatgatgtttttgaaattgttatgtataatttattttgtgtataatatttcgtataatattattgttttattttttagtaaatatgaaataaatgtgttttattttatgggagtaaaatatattgtatataaattggtttggattttttttttttttttttgttattaatttggttaggatattttagttattgttttttaaataaattagttttttttgtttgtttagttaaatatataaggtagtagtttttatttaaatttggtagaaataaatgatagttatttattagaaattaaaaagaaaaaaaaaggtattttcgggggggaaaagggttataaaatttaattttgtttttttaatttttttttggtttaaatttagaggattttattatggttagtaaataatatgaaaaagaaaaaagaagaaagaaatttagtaagtttattagtttaaaatgatttttaagtttatttttttacggggaaatttatatttttagtaaattgttttggagaaatatttgtgtatgtatatatgtatagtttatatgtattttttttaggaggaatatatttataataaatttatagggaaatatttttagtttaaaatatttaggtttttacgtttatttttaggtttaagtagagagattttttatgttatattgtattattatttttaaattttttggagatattaaaagaaataaagatgatttttaataattatagttttttagttttttaaagaatttaggggttgagaggttagagtggagttttttgagttttgtcgagtaatatgtagttgaggtaaaggttatgttttcggtgttttgttttaaataatattgatttattaattttaaatttgtttgtttttgaaattatataggattatagtttgtaaattgtaggataatgaagtaaattaagatgaattatagttttggttttttttgttattttttgatatttaaatagggaatgagttcggtgtgagtgtttaaatgaattttaagtattcgatttttttttattcgcgatttttagttttaaaaaaatgtgaaatttgattttataataaatagaaataaatattatttagttttagagaatttatttttatggcgttaggagggtcgttgtggaggtggggggagggatgtgttgagattttttgttatgtttgttaatttttcgtataattaaagtgggcgagaataaatattacgttggggaatttagagtaaaaagtaatcgtcgattttttggagtcgataatattattgttttttcgttttagttgtttttatttgaatgaaattttatttagaagtttttggagttcgaatattgagtttttgttttgtaagaaattgttgttgttatttaaagagatcgtagataatgttttcgatttaagattagtgtttaacgtatattttttttttttttaaagttttgttttcgatttgcggagggattacgtagtagtggggggtagataaaagttttttggacgagggttattttttattatgttgtttatttgagagtagtggagaggaaaacggtttttacgggcggattttggtttttggagtcgtagggtttagcggtttcggttttttcgttttttagtttggtagggggcggggagggttaaagggcggaggggaaggaaggagttagaagaggggatttggggatgggggttggaagcgttaacgagatttgttcggaggatttaggttttttgtaggttggtgagtgatttgggagttttgggtaaaagaggtgtatttcggtttagtttggttgttgaattagaataacgcgaggatattaattaatttgtaggaaataaaaaatggaagtcgaggtttaggaagagttgttattttttcgatttgagtggtgtaggttgggggcggagatttgggatttaagagaggttattttttttattttagttttttttttttggatttttaaaaggaataattttattttttttttcgttttttttataatttttattttcgttagttcgtaggtcgtttgttttttttcgtattttttttttttatttagcgagagaaatttagtttttagagt

SEQ ID NO: 964 - DNA, 28536 bp, Artificial Sequence
  chemically treated genomic DNA (Homo sapiens)
gttttgggagttaggttttttttgttggatgggaaaaggaggtgtggaaaggggtaggtggtttgtgggttagtggggatgagagttgtggggagaatggaggagagagtaaaattattttttttggaagtttaagggaagggagttgaggtgagagaaatggttttttttaggttttaagtttttgtttttagtttgtattatttaagttggggaagtgataattttttttaaattttgatttttattttttgttttttgtagattgattgatgtttttgtgttgttttagtttagtaattaaattaggttgaggtatattttttttatttagagtttttaaattatttattaatttgtaggagatttaaattttttgggtaggttttgttagtgtttttagtttttatttttaaatttttttttttagtttttttttttttttttgttttttggttttttttgttttttattaggttgagaggtggagaggttgggattgttgggttttgtggttttagaagttaaagtttgtttgtggggattgtttttttttttattgtttttaagtgaataatatggtgggaggtgatttttgtttaaagggtttttatttgttttttattgttgtgtgatttttttgtaagttggaggtagagttttaaaaagaaagaaagtgtgtgttgagtattgattttaaattggggatattatttgtgatttttttaagtggtagtagtagttttttgtagaataaagatttagtgtttgagttttaaaagtttttaggtaaagttttatttagatgaaagtaattaaggtgaaaaaataatgatattgttggttttagaaaattggtggttattttttgttttaagttttttagtgtggtgtttgtttttgtttattttggttgtgtggggggttgataagtataataaaagattttagtatatttttttttttatttttataatgatttttttagtgttatgaggatgaattttttgggattaagtggtatttgtttttatttgttatgaaattaaattttatatttttttaaagttgaaaattgtggataaagaaggattgggtgtttaaagtttatttaaatatttatattgaatttattttttgtttagatgttagaggatggtagggagggttagggttgtaatttattttgatttgttttattgttttgtagtttgtaaattataattttgtataattttaggaataagtaggtttagaattaatgggttaatattatttaaaataaaatattgggagtatgatttttgttttaattatatattgtttgataagatttaggaaattttattttaattttttaatttttgagttttttgagaaattgaagggttgtagttattagaaattatttttgttttttttaatgtttttaaaggatttggaaatagtaatgtaatataatatgaaggatttttttatttaagtttgaagataaatgtggaagtttaaatattttgaattggagatgtttttttgtaaatttattatagatgtattttttttgagagaaatgtatataaattatatatgtatatatgtataaatatttttttagaataatttgttagaggtgtaggtttttttgtaaaggagtaaatttgagagttattttaagttgatggatttgttaaattttttttttttttttttttttttatattatttgttagttataatggaattttttaggtttaagttaaagaaaaattggagagataaaattagattttgtagttttttttttttttgggaatgtttttttttttttttttagtttttgatgaatggttattatttatttttattaaatttaaataaggattgttgttttgtatgtttaattaggtaggtagagggaattggtttgtttaggaagtagtgattgagatgttttggttaagttagtgatagaggaggggagaaagaatttagattaatttgtatgtagtatattttatttttatgaaataaaatatatttgttttatatttgttgaaaagtaaaataataatattgtatgaaatgttatatatagggtaggttgtatatagtagttttagaaatattattgtatttattagagaaattattttaaaattgatatttatatattttttataataataataatatgttagaaatatatagtgtggtatttagtatatatatttttttgtttgtaagtgaaaaattttaattgtttttgtataatatgttttattttaaagtttaatttttaaaaatattgttgtgatattattaataattgtttttataaaattaatttgatattttgatatatatatatttttttagttatttaaatgttaataatgttaaatttaaaaaataataagtttatagtaatgttaaaatgttatatttagttaaatatttgtttgtgtatgtgtttttgtaattgttagaaatatttgtagtgaaagatgttagatattgaggatatttttttgaaattaaaggagttttttttttgatttagtggtttttttttttttatatagtttttttttttttttttttttttagtgtttatgattttttagtataatttttagttttttaagggtggagttgttttatttggtaaggttttaggattttggtgttgtgggtgtggtttatatgggttggtttattgtatattggtaagtatttaggttggaggttgggttttgtatgttggtgtagttgaagttggagtgttgttttgtttttagttttaggttggttaggtttgagttatatgtgtttttataaatatatggaggagttggtggtgtgtaaggataggtaggtgttggtattgtggaatttagtgatgggttatttaggttgtttaagttatttaggttgttgagattggagtttgggatgtttgttattgttgagggtattatgttggatgatatgtttatggatgagatagagttgggtggggaaaatatgttttgtgatgatagggggttgatgtttatagagttgaagaaggggaagtttttggtggatagggaggtggatgtaaggtttttggtggtttagttgttgtaggaatagtttgggtatatgttgttgtagggttgtatgagtttattgaattgtggtttgaagttatttttgtatagtttggtttgttggttgtgttttttttttttttatttggtttgatgatttttgaattaaatttgggggtggttggggtaagggagtaaatagatgttatagtgtagattattaaaatttttattggaggttaatttttgtttttttttgatatatatgttagtgtatttatatattttggttttgttttattgtattgttttgtatattaagatattagggttagtttttagttattggtttgggtttttattaagtgtaggagatttggtttgttttggtttgtgagttgggatttggagttatgttataaattttagttgaatgtatggagatttgtggatggtttgattatttagttaggtgtttttttaggtttaaaaatatttaatgtaaaataaatgtggggtagtaggtttttttaattttttttggggtattttgtaaatttgtttttattttaaagttatagatttatggatgaggagaaggggttggaagggtattagaggattgtttttttttttatgtaattttttttttttttttttgatttttattgttgttttttattttttggtatgtgtttttttaatagggattaggttgttaatatttttttttgtttagtaaaataattaaataaagagtaaaagattatttttttgttagtttgttaattttaggagtttggtatattaaattttgggaatttggaaagggtagttttggagattttttttttttttgttttgttttttttttattttaagtttattataggtttgtttgtgtgttaggtttagttgggttgtttggttttgtaggtggttatttaggttggttggtttttatttgtgtttggtggtttagttgtaattttgattttaatttatattgggtttttttgttgttttagatggtggtttttgtgtattggagagaggtttggtttgagatatttgagttgatattagtgatgttttatattatatatttttgttgggtttagttgtgtaatttgttttttttttttttttttttatttttgattttttttttatttttttttttttttgtatttgattgttataaaaagtatgttttatttttatttggtttgataagtagttgttttggaaggagaggtagttgtaaggagagtttagtgttgtggttataaagtattagggtggagttgtggaatagtgggtggggtgggagggtgtttttgaaggattttagaaaatttatagattttgtttttaattatttgttatttttattttaggttatttaaattttgtttaggtgagaagagtatgtgagaggtttgtttttttgatgtgtaagagagttaatgaaagattgattttgtttaaaattatgttgtttaggatttagttttggttttggatagttaaattaaaattatttttaatttttttttggttttttatttattagtatagttttatgttttgtataaatgttatttagagagtgtttttattttttttgatttgggagagtattttggtttttattttttttattgttgtttttttttttttgtttgttttgttttaattgggggttttattttttttatttagagtatttaattttttttttttaatagtaaagtttttggatgttgtttgatttgtttgattttgttttttgtttttagaattttaataaatttggaattttttattgattagtataaattaggatgttgttattgggttatttatttgagtttatttttgttaatttataaagtatagatttgttataaagttaaggtaagttttttttataaaattatgattataatttagaagagggggtgtgagttttaatttttagagtttaatttttgagagaagataaataaattaagtagaaaagttttttttttttttttttttttttttttaagaggattagtagttgtgtattaaaattttgtttttggagattataaaattaggaaatagggtgtgtgggagagatttgaatggttgaaataattgtaaagaaggtgtaagaagtgtgagtttaggagggaaaaagttgggttagggttgggataaaggttttttagggagggttaatttttttgtgtttttggtgggttttttttgttaaaggtttataggttggagtttgtttgtggtttttggtttggtagggattttattagttttgttttggtaattgtaagttaggaatataatgttttgtgtaggggattgtttatgtagtttagtttgtgagattgtgggatggtggggtagtgagttggtgttgttttgggagtttgagttagggtggtagttttgttggttttggagagggaattgtaattttgtaattaggttgttgtgaggttttttgtttttgtaaagttgtgttttattggtgtttttttaggtggtgttgttttttatatttttttttggtttatttggtttgtatttttataatattttttttttattttttttagattttgtgttggtttttatttggatttgggtttttgtaaggttggtttatatagtgatttttttgtgtgtggatatgtttgggtagtggtttttttggaaagtggtttttagtttttggagttgttggttggtaaagtgagtttgttgttgtttttgttgtttttttttagatgggtttttggtgtttatgtttttattttttttttgttggtttttatttttttttgaaaatgaaatatatatatttttttgttagtatgtttatttgtaatgtggatgttaattggattggtggtagaagttgtggaagagttgggttgtttggtgttggaggagggtgtgtgtggtggttttgggttgtgaggagtgttgtgtttgtggggtgtgtaggtgtaagtgtgggtgtttgtgttttattttttttttttttttagtgttgtatgttttatttatatgtttattttattgtagtggtatatttatttttatagtttgtgtttttaagtatatttatatatttttgtgtagatatattaaattttttgggatgtgtatatgtgtgtggtttatagattttttttttttttgtagaaagtttagatttttatgtggtttgggaaggttaggaaaagatgtggggatttggttgggtattgaagtttgttggtttttttttaaaaaaaaaaaaaaaatgtttttttgtgaagggtatttttgagtggttttaggtaattttttaatgagtggagttttttgggagttgaaagttgagaggaaaatagggatagaggttggtggtttttgaaggtttttgaattaagatgttgggatttttgtgatttaggaaatagaagggaggttagggtatgaatagagagggtggtagaattgtttgtgtttttagtgttttaggagttgggttggttgagggagaattaaagggatgtggggtagttaaaattttggtttttggaagttttgtggggagttaggtgaatgattatttttattatgtttttttttggaggggttgatttttttggggtgagagggagtgggtggtgtagagtagttgagtgggaatgtttgtagggtggtgtggtgttttatttgtggtttttgggttggaggtgttggagatggtgtgtatttttagtttgtgtttggaggagtttagtgattggggttgattgggagttagaattgaagttatggttaatggttggggatggtgataggaagatgaggagatggttgatagtttggtttttgttgtttggtgttttaagtgaagtgggttttttatgtagtttatggatgagggagtgtgatgttttattagtttttggttattgttttgttgagtttttgtagttgttgttgtttgttttgggttgtgttttaggtgtggagtttttttgttgtggggagagttaggggatgtaatttttgttgagtttttaagttaagttgtttttgttttttttggaaggtttaagtgaaaaagtttggagatggaaagttagtgggtaaatgaagatatgggatgtgggtagaagggtattatttagagtgtttttagggagtaggtttttaagttttaaagtgaaataagagtgggtaaagatttttttttttttttttttttttttttaagaatttttttaataaggaaagttaatgttgattgtgttttgtttgttttttttttatgtggtagttttgatagagaagtgttaagagtgatagggataggtaggtgatattagattttttgtggtggtagtagttgttgtagttatgatgtggttttttgagtgtattttttgtaatgtgtatatgtatattttttgggtggttgaataggagttgggttttgttgtagtttagttttaggtatttaggtgagtgatggattagatttgtggttttgtgtttttttgttggtttaatattttaaaattagaggtgggttttttggtgttgagatgttattttgttgtggttttttttagttttttttgtttttgtttttttttagatttttttttgggtgtgattgatgtggttttgtattaattaggatgttttgagttgtggtggagggattgttttgtttgtatttattagtagtgtggggttgggttattgttttgttgtgtgtattgggtttatataggtaagtttttgggaatttagtttttgtttagtttaaggtgatttggtttttagtatgaatttaaaggtgaagagatgaggttaggagttgaaggtttgggagaagagagtggaatggttaagaagagaaaggtataaggattaataagatatttattttttgtgttttattatatttatttttaattttttattttatataaaaaggagatatgttatttaaaattagaaaatttgaaaaatagtaataaattatttttttgattttaaattttttaaatagtttgttaagtgaatgttgtgttaatttgaagaagttttaattgtaaagaagatagagttttgaaaaggtaggttaataaattagaaattgagaagtaaatggatttgttaaaagaaaattattttgattttaaatgaataattgtttggtggtttattttggatttatataagaataaaaagttgttttagattatgttttttgtgatgtttattagtttttagatagaaaatatataatagaagagaaattttaatttagtgtttttaaaatgttgaaagtttatttattttatttaatgttgattaagatatatattttagattttttaaattttttgtatattgtattaagtttgttttaatttgagagagttatgttttaaatttgatttttttgtttattttattattaattagatttaaatttataaagtttgtagaattaataattttgagttaattatatatgaaatatgttttaatgaatttttatataattaagaatgttgttaaataattaattttaaggataatttttaatagttattttttttttttagtgagtttaaggttgttttgagttattaaagtttaagtaggtagaaggggtgtgtgtgagttaagggtgaaaagtttagaattgtgtttaattagtaaaagtaaaattttatttatataaaataaaaaaaattatttttggagatattaattttttatagtattgtttttaagtaaatttaatttttaaagaaattaaagaaagaaatttaaatatatttaaaataatttttgaaagtttttttgttttttagtataggttagttggagaggataaattaattttttttgggtttttgtatgggtgattgttttattatggagttagtgttattatttttgaatgtgtatttgtttgatattatagttaatgatttgtaatgttagtatgaagtatttttaaaatattttttttttgtttttgtttataagattgggaaatttatttgatgtggaataaagtggatgaagtagattataaatatatttgtaatttatgtgttttttttttgttttgattatttttaaattttatttgtaatttttttttattttaaatttgtagtttaaagatgtatatgagaattgttttttagtttttttttattagtattattttattttaagaataatttagttgtaagggaggaatttttttatagtaagttttaaattagtatttttgtttttaattttttattttattttattttattttatatatatagatatttgtttagagtaaaatatatttttatgtgataggtttgtattagttgaggtttatatatttagttatattaggttttgtaattttattattaaattatatatattatattagtagtttgttggtaaagaaggttaaattaatttatattttgtttattatttggtgtttaaatgatgtattttattttggagatttggtggagaattttttttttagattttatagtgttttattgaagataatgtttttatatttgtagtggtttttaatttgataagattttaatttgtttaagttttttaaataagggttttaaatgtttttagttgtttttttattgaattttttttaatttttttaagattataaagtatatgtgtaaagtaaatatttttttttattgtattgttagttgatgatttataattaagttaataagaatttagtttttttttgttgaatgtgtttattaattatattttagtttttttttttaaattttagaatagttgtggtttttataatattatgttttttaaagttttattttatgaagggattttattatattaaagaatgaaaaaaatttttattgtagttagtatatatagttttttattttttgttttttaagatttaaattttagagttgtaaatatttttggaagtttgggtgttaatgttttattttagaaagttgagaagttttatagagttatatagatttttaaatttattttttataaatttatagaattttgataaaagttttggtggttttattttattgatggaatttttattatgataaatatatatgtatgaaggattttaattagtttttaaagtggttgaaaaatttaagggtatgtgattgttttttatagtgttaatgtgtgtgagatgttggaagtattggggattagtagtagtttagatgtttaaaaagataaggtgttttaatttgtgtggatttattgaagttaagtggtgaataaagataattatttagataatttagattaaagtaaaagtaaaattatatttatttgtatatatatatttatatttattttatattatagatatatatatgtatatatatattggttttgtaaataattgatttaaagtgaggattttttttgtatttttttagtaggagttttaatatttttttaattttttaattattttatatatttatagtagtggtgattgggtgatattttttttaggttttttgtgtggtaggatattaatatgataagtttgtatggggaaaaggaggtatgtggtgggaattaagaaatattgtttagtgaaaattttgtggtatggtggtggttgattttggagatttaatgtatataagatttgtgggtgtataggtataggtagtatggatgagaaaggggttagaagaaaataaattttatgtattttgtgattttagtattattgtgatttttggttaagttttttttaattggttttagaaattattatgagtttagtttttaatatagaaatttttaatatggagaatattggtgggattttggtagggaaattagaggtgttgtatggtttatgtggggtaaagaaggaaagtttagtgttggtgtgaggttttgagtttgggagatattaggggttgttttgattggggttttttgtttatttttttaaagaaagattttagaggagggaaatgtgtgatatggggttagttgtgttttgtgttggtatttgttattgattattagttttaaagttttatttaattttatattttttagtgttagttgtgtaaagtttttttggttatggtagtgagtggttgggttgtgttgttaaattttttgtattaatttggtttgggatttaattaagtgatttttgatttttggaaagagtttgtttttagagtttatttagaagatggtttaattagatatttttttgagttgttaggttttagatgggtgggagttttgttttgtttaagttagtttaaggatgaggtttgtttggatttagtttggagttatgtgatgggtgtgagtgtgtgagtttttggtaaggtgtagaggttagatggagattttgtattttgtttgagaagtgttttattttttttaatatttggtttttttttgtatataaattaagttgaaaatagtttattatttattattttttatagttatggaattaaataatttagaaattaaaagttttattgtagttgtttttttttttattttttaaatggaatttaaaaagttttggtttgttaaaaggggaagattattttttgaattggaagtttgtagatatattgagtaatagttattttttttgggtttttgtaaatggtatttatttttttaatttatagttttagttgtttaattatttgagatttggggtaattatttgggggaatagtgtttagatggtagtgggagttattattttatagtggtttggggaagagaagagaaagagattagaggagggggtatttgttaaaattatttaatgaatatgttgttaatgtttttttatatttgtatgttattgttatagtttttttaggtgttattgagtttttagaaagtaattatttgttgaattaagtaaaataaggagaatggtatagtatatgtgtttggagaaggggaaggaagggtggaatatgaaattgagtatagatatttaggttaggaaagaaggaagtggtaaggggttaaatgaagttttatttttttgttatttttttaaataatagttggattaaatatttatttgtttttttttttttttttttttttttttttttagtttatgtttattttttttttttattttttttgtttttttttttttttgtttttttttttttagatatgttggtagttaatatttagtattagttgttatggtgattataaattatttaaatttaaaaatatttatttataatttgagatgaagtttttatttttttagtgaaataatattttaaaagttgttagttgataaaaaaaaaggaatttattttattgtagtaatttaagtaatatattatttttaaaggtttaaattaaaatgttagtttgttaaaaatatgttggtagagttttggatattttttttgttagatttttataaagaagttgattttgttatttttggttgttttttaatatatatatataattttgtatgttttttttttttttattaattttttttttttttattaattattttagtttttaaagattttatgtattgggttttaaaagaaaagaatttttttttggattagaaaatagttttattggttgttgaagtgaaagatgtggggtttagggggaaaggttattaggattataatggtggtggtggtaggaggttattttagaggagttaagaagaaaaaaaaatgtagggagaaggattggaggtggaaagatagagtaatagaaaattgagttgggtggttaggtgttgtggtgaagtttagttttgaaatgataggtatatatttttttatttttgttttttttttttttgagagaaaatttttttagttagagattttggggggtaggaggtgggtaaatgttgttgtagttgggttttttgttttttattttgggtttgttgttttttgtttattttggattatagggtatttgtttagatgaagagttattaattatttatttagttaatattaggaagatgataaagttttttatataggattaagaagatattagattgttttattagtatatttttgtttatgaataagtttttgttatatattttttttttttttgagttgttttaataattgttgtatatattagtagtgggtggtgaggaataatagttgaattagttttaagaaattttgtgtattgagttagtagtgaggaatgtgatttgtgaagattatttttgtgggtagggatttgtagggattgattatttttggataattggtataattttttttgggggtgaaaaattataatgtggtggggtattttttaagtgagttgtagatttgattggtgtggggggtgggggaggggaggggagaatgggatggtggaggttgggtggaggaaagaaaatggaaaattttttttatttttattttgttgttttttttttaagttttatgttttttttggtaagtatttgttttttttgtgttagttatagttagagttttttatttttttttatatatttttttttttttgataaggtttaggattttggttattattttatgtattattattttgtgttttgttagagatggtttgggttgattttgttggtgtttatgttaggattaaaatttttttatgatggtgaggaaaattgtattatttgtttttagggggtatattaggagtttatgtagtatatgttttgtaaatatttgttgattgaatgagaggtgtgggggtggggtggtggagaggggtttgtggttgttaaggttgttagggttaatttaggttttttgaagaaggttgggattgagttgttgttgtgtgtgaaggtgtgtgttgtggttgggggtgttataatgggttatggagtttattttttagagggaggaagtttgtgtatattagtgatttgggttgaatatttttagtttatttattgggttaaagttatttaataattaatgtgtttttgggggaggttgggggaagtatttgttttttgttgggatgtaaagttaggtgttaggtttaaaggggttgtagtgtagtttgattttagtatggaatttagagttgttgttttgaaattttttaagttagtgatagaggagggttagtttgttttttttttgagggtgaagattattttatgagttttttttaggatttttaaagtaagaaaagttaaagaaaggtttttttgttttagggggttgtttttagttggtttttatattattttttgttagttgtgtttatttttttttaaatttttggtttttaggggtttttagttgtttttgtgttatttttgttttggggttttatttaggttgggtatttgtttaatggatattaaggagaatgggatttattagggaaggaaggtagagtttggattgtttagaggtggattttgtttatatagaatgtttagtttttaatgaggatatggtatttttgggtggtgttgggggtagaggtggagagggtagtgtaatagattattatggttttttgaagaagttatatgttattgtgaattttttttttttttaaaagtaaagaaaaattttaaaaaaatataagaaataaatttttttgttttataagtaggttgtggttaggattttggatattttataagttaatttaaaattagggaaggataggtgttttattttttagtagtgttatagttttgtttatttgtgtgatttttttttgttgtttattagttttttaaaagttaattaaattaagatttttagtatttttttttattatatgtttttttttaattaatggtattaaatgtgtttaggtagtaatttttttttttggttaaaaagtagaaaaagatatattgagtgtaggggaagagttttttatgtgtattaaaataatgtgggtttgaaagtaatggttaagaaagtaattatttattatttttagttttttatgtgttagttattaaaagtgaatgattaggggtgtttgtgtggtttgtgattggtgtaagtagaatttttttgtttttagttgttttttgtttatttatgaggattttattttattgtaggtttttttatttgtttttagaatgtattttttatgtttaggaaatttggggtagggattgggggaaggagatattttgtgtttttttggtttttagtataataagaaatgttagttttggtttggtgattgtgagtttgttttgtgtgaagtgagattggggagtttttttagtttggttggagttagggttgagtttgtgtaaagtattttttttagaagttattgttgtttttgatttttaattatattttaaatatattatggtttaataatttatttttattattgattattaaatagaagaagaatttaatataatttaaatgatagaaattatgtgatgttatttttgtattgtttttatttaattttatggggttaattttggataagtgagtgtttaattggtttagtagggtgattggtggtgtagtgtagtgtttgggtgtgaagtattggattgttttagatgttttattttaataaatgattatttttttttagatttatggggaaattttaatgtaagatttttgttttttttttagtaatatggtttgtttttttgattggggttttaaattgtttttttttattttatattatatttgtatttttatattttaatttggaaagagggggttaggggttgagggttgtgggggggggggggttttatttgtttatattattaaaggttaatagttttttaaggttaggtatttatttattatggagttaggaaaatagaggaatagtaaatttgaggggtttttttttatgtatttgaaaagaaaggtatttttttttttttattttttatatttttttttttgttttatagaataagttttaatttaggaaaggtttgtggtgtaggttggagattttttaattttttatataagtttgtagattttttttggtaatgttttttgatttttttagagtgaaattagttaattaagtaatgatattgttaaaatttaaggtttggtaattagtattttaggtaggtttgtgttgataggggtaaatttttattttattttgggttgttaagtatagtggttgttttttagttttttagggatgttgttggttttttgttttttttttaattagttaaagtaaatttttgttaatttaagttttttttgtttgttttttgtgatgaattgtgtatttataagtttgggtggggtgtggttgagagtttgagtgattgagtgggttttggtggtgttgtgtgtagtgggatataatgagtgatagaggttgttgttggattatttttttatgttagtttagatgttgaggtttgttggagtgtgtgtaggggattagattatagggagtgagtgagagggagagagaggtgttgggttttaggagtgtagtataatttggggaaaggaattaatgtttttgggatggttgttttttgttttatttagaggtggagtgtttaagtttaagtagtaggtgtgttaggtttggtggttttgtttttttgtgttttgtttgaggtttagagttttggaggtgggtgtttagtgtgtggtttgtgttttttttttggttttattattggtgttaggatgttgttgtgggaagaatttgttgttggttgtttttttttggtttttaggagagtttgtgaatttgatttttttgattttggagtttttggagaagagatatttaatggttgttggttgtatgtttgggttatgtgtgtgtttgttttatgtgtggagagaggtgttttggattgtggttgaaaggagttggggatgggaggagggggaggggtgaggtaggttggaggagaaagagggataaagagtaaagatttagttagaggaaagagttgatggtatttttgttttttggattttttggtaatttggggtaggatggtgtattttttttgtgtttttttggttgttggtggttttagttgggaggagtaggttggggggttttggtatatagtgtgttgttgttttttagtttattgttttgttatagggagaggttattggtgatttggttttgattttttttttgtttaggttggttttttggggaagtgttttttgttggggttttgttgtagggttagtgtttttttgttgtttttatgtggtgtggttttttgtttgatgatttgggtaggagaagggggtttttatttaattgtatatatgttgatattagtttgtggtagttggtttttattttttgttatttgtaaaatagaagagaaggaaggttgtaagaagtggtggttgttgagtgagtagggtttagatgagattatgttatattagttgttaggtgtttattgtgtgttaggttttaggtgtgtttttttgatttgatagtttttggttgtgtagtagtatttttagtttagttttgggtttaggatatttatttattaagaggggatttttttttagagttgttgtaaaagtgtttagaggttagaggattataaagttatagtgtgttggggaggttgtggatttatttttaagaattttggtgttggggttaagaatttatttgaatgtaatggtagtgggagtgggtgggtggagaggatttttttttttgggaagttgtatgtaaagattattttttagtgtttgtttattagttggagtttggtaaatatttgtagaatattagtgttaatgtgtttttgttttagatagtagttttttttggttttttgtaattttgaaatgaatgggtttttggtttagggtgttttaggagtgagttgagtttgggttttttatttattaggagttatttttttatatttagttatatttttttttagagatattaatttggttatttatttatttattataaataattattttaaagtatgatttaagattgtagaggagagatattgggtggattgagtgagattgaggagagtagggtaaatgtttttggagggtttattgtttgttaaggatggagaaatagttttggtataattgttatttagtttttttttttttttttttgggtgagttaaattttttttatgtttttaattataatgtagtgagttaagtatttaatgtgtttttttttttttgttataggtaagttgggagaggtgggttttgaggggttttattgggtgggtagaagagttgtggttgttttaaagataagaaaagaaggtttagggttttttaggtttttttgattttagtgtttgtttttttttatgttaattagggtatgttgatgattggagggtttattttgtgtgggtgtggggattggggtgggagtaagtgttgttgggttggtggaggtatagaggtggggtagggagttgtgggtttgtttttggtttgagtattgtttttttgtgttttggttttttttgaagggagttgggttttggggagtttttggttaaggttgttgtttataggaggggttgtttggtgttgtggtgtggggatttagggtggggatggttaggtggtttttttatttgttagtgagaatgtgggtggggattttgttgatttgatttttgtgggtttgtgggtttagaagtagtagtttggtggttttagatttagtgattttgtagtaaaattataggattagtttttgattgagatgtttgtttgtgagatattataaaatttattattatagttttttattaatttgatatgaagtaatatagatgggattttattagtttagattttaaatgtttatttatgataattttggaggaaatttgtatgttattattattttgataattttttttttttatatgtttgaattggttgtattattagttggtagttggagtattgtagatggtaattgtaaatagtttttatttatttattttttttaaagaatgaaatatataaaagaaaaagattgtgttgtttggtgtaaagttagttaattattatatatttttttttttatttttttgtgttttagtgttgaagattaaataaagtaatataaaataaatttttaagaatttatagagttttattttaaggattgaaaagaaggttaaggtgtgttttttagtttatttttatatgtttttgtgatttggagatttattttgtagttaaaatgagttttgagatttgtatttttatgttttatttaatgattaggtttattagaagaattgagtttaaataattggggaagataattttttaaaaagagatttttaatttttgtttgttgatttttaaatttgttttattaagataagttttttgtgagaaatttggttgttagattttggaattggttttaatggttaattttataaattgagatgggagattttttttgatgggaggtagtttttatttttaaagtttatgttttagttggaatgtatatgttaaggatttttgttttggttaatttgggttttatattgtgagtatataaaaagtattatatggttaatggaggatgaggaattatggtaaagtaggtaggtaagttttaagaaataaaataatttgttaaaaaataatttttgatgattattgtaagattgaaagtgtaggaaaaatatagtttgaataattttagatttttttatattttttttttttttatatattttgttattttataataaaatttttaatggaaagtttaaaaataaatagtataggaatatgtgttttaaatgaattaaattgtgaaattagttagtaaattaatttgtagtaagtaattatttaaggaaattaaaatattgtttagtttagttttgtattttattatgtgtatgtgttttttataattaattaatataagtgttttaggaatatttgaagataaatatgtttaatttaaggaataaagtatttaaataatttaagtgtaattttgttgagttaaagtaaaatattttataaatgaagtggttatttaattttttagggaaagtttggttattgaaatgttgtatgtttatgttatattaataaaaatttttaatttattttgtttatgtgttttgtttttttgatattattggtatttgaattttagatggatttttgttaaaatgatattttgtgtgataaaagtatttttagttttgattgatagattaaaataaatgtaaggaaatttttttaaattagattaattttttataaaaatattttagaatgtatgaattttgatatttatatttataatggtaaaagttttttttgtttagtttagtaagataatatttatataaaagagtaaaaaaaaattatattattttatgatagtttgatttttaaattgtttaagaaagtaaagtggttaaattggaaaagaggaatatattttggaggtttagaattgaaaattttttttttaatttttagttggaaaataattttttgtatttatttaaagtgtattttttgaagtgttagattggagttgattggtgattaatttaaaggagttataatttaaagaaatggtgagagtttggtatttaggtttggtttttaggtaatttgtttgggtttgagaggttattaattgttagttaagatggaattttttttttttttttttttttttaatggataataatgggaagggggttaattttttagtagttgaaattttgtatttagttttttattttgagaatgttaatttttggtttgaggatttgtttttgtagtgttggtattgagatttaagggaagatattttgttttaaatgttagttatggtttggttttttttttgattttagtattttgtagattgttagtgtttgtggtgggggatgaaaggaatagggttttgtaaggtttgtttgttgattgtgttattttgggtgaaatttagttttaaaagttataaattatttatggtgaagattttttgaagtggaataaatttttagatttgtattattttatatttttgtgggatagatggtttttatttattggttattgggagagagttgttgtttttgtgttttattgttttttggggtgatttttagtgagttgagtttttggttgtatggtaagtgtttgaaagttgggtttgagaggattgtagggtttttgagggtgttaagttttgaaggagtttatgggtgtattggggtttttgaaatttagttgttattggtagtttttttttgtttttttttagtttttttgtttggttttgtattttttttttttttttttttttttattttttttttttttttttgtttttattttgtgtggggagtgatgtgatgttagtagagattttattaaattttattgtatagtggtgtgtgggtggttggttgagtttggttgtgtggttggtgatttaggagtgagtatagtgtttgggtgagtgttggggggagtgagtaggggtgatgagaaatgaggtaggggagggaagtagatgttagtgggttgaagagttgggagttggagttgggagagtgaaaggagaggggatttggtggggtatttaggagttaattgaggagtaggagtatggatttttattgtggaaaggaggattagaagggaggatgggatggaagagaagaaaaagtaatttgtgttaatttggtagttttaataaattaaagggggagtgttagggtagtggggagatagaaatgtatttttggggagtaaattaggatgggttgggaggaagtgatagggaaagtggtttaagagatggaataaaggataatgtttatggggttgtttgggatgaggtgtgtggagtgtgggtgtgagtgtgtgtgtgtgatttttttttaggtttgtagagttgaggaaagaggttatagtaaagagggattgtggagggaggaaagtgagagattggtagagggtgggagtggaggtgggtgtggtggggatgggagaggatgagtgaagagaaatttagaagaatggagtgagttagtgggagagggtgggagggttatagttgggagtgaatgagttaggtttgttagttggggaaggttgggatgttgggtttagtttagttgggatattgtgtttgaggttaaggtgggtggattaggtatgttgagagtgttggtgtataggtgggtatggttatgtattgatttagtgtttatgaagggtttgtattggataaggtttagatgtttatagagtttagaattttttttgttgtatttatatttaataagtttattttgggttatggatattttattttttaaaatgatgaggttaaggtttttggtgaggatggtattaaattgtatgggatagaagtgggggtgggggagagagttttttttaagtttatatttgtttttgtaaagtaaagagtatgtgaaattatagggtatatttttatttgaaaagtgtgttttatttttgaattttgattttttgattttttgatttgagtaaagatgtgtattttggtagtgagtagaatattttggttttgttttgtttttgagtggaaggattataaatataatttgtttggaggattaggtgtgaaggtttttgttaggtatatgggataatgtttttttaattttaagggtattttgttaatgtatgtttttggaaagtgttggaatatagttattgtttttggatttggatttttttattaatattaatttttgtttgagagtaaaatttaggtttgttattaaaaagatatttttttggtttttaattgagaataaagttttttttaaaagttgtattgttttttttaaattaatatattaatatttgtaattttagaaatatatagtgatttgggagaatgtgtataaaatagatatgtttaaaaaagtttggtgtttaaaattaattttagttattatataggtgttgggttttttttatttttgggggttgtttggaatatgttatgtgtttttttgaattattttgtgttttgaatttatttgagttagtagtaaaaataggtaaataaatttgtttaatttgttttgagtgttaaatttttttattttgaaatagttaatagttgatagatggatttattttatggaaagggttagtttttttagttatgaagaaaattgattagagatttatattttaagttatttttaatttttatgtaatatttgtgaaaatttaaattttttttttttatttagtggaaatttaaagtagtgttatttaaggggagagaaatgagggggaaaatgtttatgtgttgtttaattgtattttttttttgattttgagaatttttatttttggtttttgaaattttgttgaggtaagaaaattaaatttttttaataagttttataattgaattttagttataggatattggaaagtgtagtttgagaaagatatttttatttttgtttattgatgatttttgtagtttttttatttttttgagtaatgggttaataattttttttttttttttttttattttgtagagattaagaggtgtttgtagtagaatggttttgtttttagttggtggtgaggataggtaattttatggaaaagttggaagagaatgagaaaattaaagatagaaagatttagagatttgtggagagatatagggagagggaagggagttgtgttgaaaagatgtaaagatatgtgtgtgtaattttttttttttttaggttttagaggtttgtaaattagggttgagaggaaggggtttgggaagtttatgttttttttgttttttttttgtttggagttttgtttgttagaggttggttaattttagttttggttgttgtagatattgtgttgagtttttgggtttttgttttgtttagtgttagtgtagttgaagtgagtagttggtgggaaatgtaaatggtttttggagaaatagaagatatagaatgatttttattttttttttgagtgtgtggaaggagttggatatatgttttatgtttttaattttttttttatatttttagttatatttttattaaataattaattaatgtttagaattattagggaatatattaggtatgtaattgtagaagtagggtgttggggggttataaattattgagttgatttaagatgtggattttaggttttttttttgttaaagtagtaaaggaagagtgggttttggtgattgtatttagattttgattattttaaattagaagggggtggagggagtgtttaagtaaagtaagtaattttttgttttgtagatgtaaataagattgtagtattaaaggtattagtttttttagggttagattgtttggattgggagtttggggaaggggagatattaattttatgtatttgtgaattttaaggatgttatatttttatataaataattttagtgtggattttttggaatggggggagtaatatttttattttagaatattaaaatattttttttttaaagtgtatattttttttatttttttaaaattttgaattatgtttaaagataatagttttttagtaaattggagtattggattattttttttatttttttttattgatattttgatgatttgattttaatgtgtggggggtatagggaattaaatatagtttataaaattaagtttagatgaaatagtgttggttaagtgggtttagataatttttaatgagaattttaattatatttttttttttaatatgttgagataagtgatagaattgttagaatggtaattaaattggaaagtttagggagaataataattttgtgattaaattggggtaaaattgtggataaatgtggggtgatttttgttaattttttgttatttaagagttaggatttgggaaaggtatagtattattttagagtttgttgtgatgggttgtgtgttattatttattttttttattttggattatgattttaattttggtaagtaatttttttagttttttatttgataataagtgagtatgtaaatattaatggttagtgatgtttaattgttttaaatattattgatttgttggttgttttaaattgtttttttagtttaggttttgtttttgaattgtttattttagaggtttgatttatgtttttgatgttataatataataattgtttttttaaaaaaggtatttaagatgaattaattgatttgtatataaattaaaattattatgtgttgttgattttggtgttttataattattttgaaattagtatttaattatttgagttaaaagaatatataaatgtttgtattgatttattaatgaattatttaattaaaatgtttgggtaatgttgggtgttggaaagattgttaaattaagatatattataggagggatatgaagattagaaaggtaatagattaatattttgtatttaaaatggagtttttggtgatttttagttttaattttggagtaggggttttttttttttgttgttaaaaagattttgtgtttgtttgtgagtgagtgtatttaagtggaaggaatgtttttatggttatggtggtttaggttttttgtttggattgggattttatagttttaatttaggagtgttaaattttggaagattttgggttagttttggaggtgtgtggttttgtaagttgttaggttaagtttgttttttttgtttgtttttttggtaggttgggtgtgttatggtagtgagttttttgtgtaaatggagagttggaattaaagttgatatttaatagatatgttaattgagtatttatttttgttttgagaataggaataaaaggtagttttttttaagagaggtggtgtaaaggtatgttataggagtttagaaaaggttggtggtgggaaatttgtagtttgggggttagttaatatttttttttattttaagtatttattgatttgttgttgttatttttggtgatgtagaaggatatttgaaagaatttttgatggggttttgatttgagaaaggaggtgatttgtttaggtttttattaaatttttaattattatattaattgtttttttttattttttatttgatttttttttttttgtttatttttaattttttaattatttagaaatttttttattttttagtggttttttttttgtagtagttttttatttgaattttttttttgtttttttgtggtagggtttgtatattgatttttttgatttttggtatatttgggttttttgaaattttttaatttttttagatttgaggatggtaggttttattttttttattgtgtgtatatatttagagatatgaaaatttatatagattgtttttaaatttagggtatttaatagatgttttttttttagtttgttttttgatttgaaatgtttgtttgattttaatttggatattatttttttttgtttttttttttttaaagtagtttggatatgtgtgtaagtgagtttagaatagttttatttatattttttattaaattgtaaataaaagaagaattaatgaagtagattggtatatagattgtattaagagtttgaatttttagtttttggattttttatttaattttggttgttatttatattgatagagttattttaagtagaggtttagagaaatttgtattgtgggataataggtaaagttatagtaaaaagtggaataattttaaagttattttattagaatgtaaattgtatttttgggttttgtttgtaattatttagttttaatatatatagagttagataggaaaaaataggttaatatagttattggtattagagaagataaattttatgggttttttagtgaaaagaagatttttaaagtttataatttttgattatttaattttatttataattgtgggaatgaataagatattaattgttttatgtattttatttatattaattaatttgtgtttttattaaaagtagttatatagaattttttttaatttttggtagtaagtttagaaaatgaagtttatagttattttgaattggatatattttttgagttgattatttttgtaagtgtaggaatataatattgtttttttatggtttttttgtatttttttagggtttgtaagtttttattaggtttgatattattgtttgggtttatatttattataagtaaatttgattattatgttgattttaaaatagtttatttggttagtataattttagtttttaaattataaaaattttttaatatatgaagtttttagtttttattttttttagttttttgtttatttaaaatttttattttaattggtgtaagtaataataatttgtattattatttgtattttttttatttttttggagattgggttggattttagagagaatattagtattattattattataaataataaaatttaaaagtaaagtttttatttgtatgataattggtatttggaatgtttttgatttatttaatgttattttataaaggtattttgtaaatttttttggaatttttagtaagagtttgtagtaattggaataattttttgggaagatattttttttgatgggtttttagtttttggaggaatagattgagagtaattagggagggaggggatattggaaattggtagttatgttagttgaaataagtttgggtttagtaaggtgattgatgttgtggttgattttttattttgagtttttttttaattggggtattgattttttttattttgggattttaaggtatttggtgtgtatgtagattttttttttgtggtttttattatgtggttttgtagtaggtttttggtttaatgatattttatagttatagtttttatatttattattatgattttaatgtttaggtttttagtgtatttatattaaatttgttttattagtaagttggagtatataggagagatgggggtaagtaaggatttagtagagtttaaatttagatatgtttaaatggttttgattgtgtaaagtgtggtaatgttttttgttgttttagttttttattttaagttttatatgttttttggttaatgaagtgtgatataggttatatgttaggaataatagtatttgttgagaataaagtgaatttaggaaatttggtatatataaaatgtatt

SEQ ID NO: 965 - DNA, 28536 bp, Artificial Sequence
  chemically treated genomic DNA (Homo sapiens)
gatgtattttgtgtatattaggttttttgagtttattttgtttttaataaatattattatttttagtatgtggtttatattatattttattagttagaggatatgtgaagtttagagtggaaagttagggtagtaggaagtattgttatattttatatagttaaagttatttaaatatgtttgaatttgagttttgttgagtttttatttgtttttattttttttgtgtgttttagtttattaataaagtaggtttaatataaatatattaaaagtttaaatattgagattatgataatgaatatgagggttatgattataaaatattattgaattagagatttgttatgaaattatatggtgaagattataagggaggaatttgtatatatattgagtgttttgggattttaaagtgggaagagttagtgttttaattaaagagaaatttggggtagggaattaattataatattagttattttattgaatttaggtttgttttagttgatgtagttgttaatttttaatgttttttttttttttaattgtttttaatttatttttttagaaattgaaagtttattaaagaggatatttttttagagagttgttttagttattataagtttttgttagaaattttaagaaagtttataaggtatttttataaggtggtattgagtaagttagaagtattttaagtattaattattatgtaaataagggttttatttttagattttgttgtttgtggtggtggtgatgttggtgttttttttggaatttagtttaatttttaaaaaagtaaaaggagtataaatagtaatataaattattattatttatattaattaaaatagaagttttgaatgagtaaggagttagaggaggtaaaaattgggaattttgtatattaaaaggtttttataatttgaaaattaagattatgttggttaaataggttgttttaaaattagtatagtaattaaatttgtttgtaatgaatgtagatttaaatagtgatgttagatttgataaggatttgtaaattttaaaagagtgtaaaaagattatagaagaataatattatatttttgtatttatagaaatggttagtttaagagatgtatttagtttagggtggttgtaagttttattttttgaatttgttattagaagttaaaagaaattttgtataattgtttttgatggaaatataaattggttgatgtaaatgaaatatataaagtagttggtgttttatttatttttataattataaatgaaattaaatgattaaaaattatagattttggggattttttttttattgaggagtttatggaatttgttttttttagtattaataattgtgttgatttatttttttttgtttaattttgtatatattaaaattaggtggttatgaataaaatttagaaatataatttatattttaataaaatgattttaaaattattttattttttattgtggttttatttgttgttttataatgtaggtttttttgggtttttgtttagaatgattttgttaatgtagatgatagttagagttgaatggggaatttagaaattggggatttgggtttttgatgtaatttatatgttaatttattttattagttttttttttatttatagtttggtaaagaatatgggtggagttgttttgggtttatttgtatatatgtttaaattgttttgaaaaaggaagggtaagaaagagtggtatttaagttggaattaggtaggtattttagattaagagatgaattggaaagggaatatttgttagatattttgggtttgaaggtagtttgtgtaagtttttatatttttgagtgtgtgtatatagtggagagggtggagtttgttatttttaaatttgaaaagattgagagattttagagggtttagatgtgttaaaggttagagggattaatatataggttttattatggaaaggtggggaaaaggtttgaatagaaaattgttgtagaagggaagttattgagaggtaagggagtttttgaataattaaaaagttaagaataagtaaaaggaaggaggttgggtgggggataaaaaaaagtagttgatgtggtaattaagaatttggtgggagtttgggtaggttatttttttttttagattagagttttattagaaatttttttaagtgtttttttgtgttgttaaagatgataatagtaaattaataagtgtttgaaatgaaaggggatgttgattagtttttaggttatagattttttgttgttagttttttttgaatttttatagtgtgtttttgtattgttttttttaagaagagttattttttatttttatttttaggatgaaggtaagtgtttagttagtatatttattaaatgttagttttggttttagttttttgtttgtgtggaaagtttattgttatagtgtgtttagtttgttggaggggtagatagaaaaagtaagtttggtttggtgatttgtggggttatgtatttttagggttggtttggagttttttagagtttaatgtttttgggttagaattgtaaggttttggtttgagtaaagggtttgagttattgtagttgtgggagtgttttttttatttgaatgtatttatttataaataagtataaaatttttttaatagtagaggagaaagatttttgttttaaaattaaagttgggaattattggaaattttgttttgagtgtgagatattggtttgttatttttttaatttttatattttttttgtaatatgttttgatttaataatttttttagtgtttagtattgtttggatgttttaattgggtaatttattagtgagttaatataggtatttatatatttttttagtttaagtggttaagtattaattttgaaatgattataaaatattggaattggtaatgtatagtaattttaatttatatgtaaattaattggtttattttaaatgttttttttaaaaaaataattattgtattgtagtattggaggtatggattaaatttttagaatagataatttggaaataagatttggattaggaagataatttagaatagttaataaattaataatgtttgaggtagttaaatattgttagttattggtatttatatatttgtttgttgttagataaggagttggggaaattgtttgttagggttgagattataatttagagtgaagaaagtaaatggtagtatatagtttgttatagtgggttttgaaataatattgtattttttttaaattttgatttttgggtgatagggagttggtggaggttattttatatttgtttatggttttgttttaatttgattatgaaattgttgttttttttgagttttttaatttgattattattttaatggttttgttatttgttttaatatattggggggaggagtgtaattgagatttttattaaaaattatttgaatttatttagttagtattgttttatttaagtttagttttatgggttgtatttaattttttgtgttttttatatattaaaattagattattaaaatgttggtaggaaagggtgaaggaaatggtttaatgttttagtttattggaagattattatttttagatatagtttaaaattttgaggaaataaaaaggatatatgttttggggggaaaatgttttaatattttagaatgggggtattattttttttattttagagaatttgtattggagttgtttatgtaaaaatgtaatatttttgaaatttatagatatgtaaggttagtgtttttttttttttaggtttttagtttaggtgatttagttttaaaggagttagtatttttgatgttataattttgtttatatttgtagggtagagaattgtttgttttgtttggatgttttttttatttttttttaatttgaagtaattggaatttaaatatagttgttaaggtttgttttttttttattgttttgataagggaaaaatttgaaatttatgttttaaattagtttggtggtttgtagttttttagtattttgtttttatgattgtatgtttaatgtattttttggtgattttgggtattaattagttgtttaataggagtatgattaaaaatgtaaaagaaggattaggagtgtgaaatgtatgtttagttttttttatatatttgaggagggaatgagaattattttgtattttttatttttttaggagttatttgtattttttattagttgtttattttagttgtattggtgttgggtaaggtgaggatttaaaagtttagtgtagtgtttgtggtggttgggattggggttaattagtttttggtgggtgagattttagatagaaggggggtgagaggaatgtgagttttttgagttttttttttttagttttggtttgtaaatttttgaaatttgaaaggggagggagttgtatgtgtgtatttttgtgtttttttagtgtaatttttttttttttttttgtgtttttttgtggatttttgaatttttttgtttttggtttttttatttttttttaatttttttatgagattgtttatttttgttattagttgaaggtaaggttgttttgttatgagtgttttttaatttttataaaatgaaaagaaaaaaagggaggattattagtttattatttagaggaatggggaggttgtaaaaattgttgatgggtagaggtgaagatgttttttttggattgtattttttggtgttttgtaattagagtttagttgtgggatttgttgaagaaatttgatttttttgttttggtgagattttaaaaattagaaatagaaatttttagagttagagaggaaatataattaaatagtatgtgggtatttttttttttatttttttttttttaaataatattgttttgagtttttattgggtaaagagagaaagtttgagtttttatggatgttatgtggaggttagaaatggtttaaaatgtagatttttaattagttttttttgtggttgaagaggttaattttttttataaaatgagtttatttgttgattgttagttattttaaagtgaagggatttagtatttaaaataaattgagtaagtttgtttgtttgtttttattgttaatttaaatgaatttaaaatatggagtaatttaagaaaatatataatatgttttagatagtttttaaaagtagggaaagtttagtatttatatagtgattagggttagttttaagtgttaagtttttttaaatgtatttattttatgtatatttttttgagttattatatatttttaaaattgtgagtattggtatattgatttaggaagagtaatataatttttagagggaattttatttttaattagggattaaagagatgtttttttaatagtgggtttgagttttgtttttaagtaggaattaatattggtgggaaaatttgaatttaggagtaatggttgtgttttggtattttttaaaaatatatattaataggatgtttttgagattgaaaaaatattgttttatatgtttggtagaagtttttatatttggttttttaggtgaattatatttatagtttttttatttagaggtaggatagagttaaaatattttgtttattattaaaatatatatttttgtttaagttaagaaattagaaaattagggtttagaagtaaggtatattttttgagtgagaatatgttttgtaattttatatattttttgttttgtaggagtaaatgtggatttgagggaaatttttttttttatttttatttttattttgtgtaatttaatattatttttgttaggaattttaattttgttattttaaaaaatgagatatttgtgatttagggtgaatttgttgaatgtaggtatagtagaggaaattttagattttatgagtgtttgagttttgtttagtgtaaattttttgtgaatattgggttagtgtgtggttgtgtttatttgtgtgttgatatttttagtatgtttggtttatttgttttgattttgggtgtggtgttttagttaagttgggtttagtgttttggttttttttagttgataagtttagtttgtttgtttttggttgtggtttttttatttttttttattagtttattttatttttttagatttttttttatttatttttttttatttttattgtgtttatttttatttttgttttttattggttttttatttttttttttttgtagtttttttttgttgtgatttttttttttaattttgtaggtttgaaagaaggttatatatgtatgtttatatttatattttatatgttttgttttaaataattttatgaatattgttttttgttttgttttttgggttattttttttgttgtttttttttagtttgttttgatttgttttttaaaagtatgtttttgtttttttgttgttttggtgttttttttttgatttattagggttgttgggttggtgtagattgttttttttttttttttattttatttttttttttggtttttttttttatagtgggagtttgtgtttttgttttttggttggtttttaagtgttttgttaggttttttttttttttgtttttttggttttggtttttgattttttggtttgttggtatttgttttttttttttgttttgttttttgttgtttttgtttgttttttttggtgtttgtttgggtgttgtgtttgtttttggattgttagttgtgtagttgggtttggttggttgtttgtgtgttattgtgtagtggagtttggtggaatttttgttgatgttatgttattttttatatggagtaggagtagagggaagagagagggatgagagggagggagaggagagagagtgtgagattgagtgagaaagttggagaggagtagaaagaaattgttagtggtggttagattttggaggttttagtgtatttgtggatttttttggaatttggtatttttaggagttttgtagtttttttaggtttggtttttgggtgtttgttgtgtagttggaggtttggtttgttggaaattgttttgggaagtagtgggatgtggagatagtagtttttttttggtagttggtaagtggaggttatttattttgtagggatgtgagataatgtgagtttggaaatttgttttattttggagaatttttattgtaggtgatttgtggtttttggggttaagttttgtttaaggtaatgtagttggtaaatagattttgtaaagttttgttttttttgttttttgttatagatattaataatttatagggtgttgaagttgagagggaagttagattgtggttggtatttaaaatgaggtatttttttttaaattttggtgttaatattgtaggaataaatttttgggttaaggattagtatttttaagataaagggttgggtataaagttttagttattggaagattagttttttttttattgttatttattgggaaaaaaaagaaaagaaaaagattttattttaattggtagttagtgattttttaggtttaagtgaattatttgggagttaggtttggatgttaagtttttattatttttttggattgtaatttttttaaattgattattagttaattttaatttggtattttaggagatatattttaaatggatgtagagaattattttttagttggagattaagaaaaaaatttttgattttaaatttttgaaatatgttttttttttttagtttaattattttatttttttaagtaatttagaaattaaattattataaggtggtgtgatttttttttatttttttgtgtgagtattgttttattaaattaaatggaaaaaatttttattattataaatgtaaatattagaatttatatattttaaaatatttttatgaaaaattaatttgatttaaagaaatttttttgtatttgttttagtttattaattaaaattaaagatgtttttattatataaaatattattttggtagaaatttatttaaaatttaaatattaataatattaagaaaataaagtatataagtaaaataaattgaagatttttgttgatgtaatatgagtatataatattttaataattaaattttttttaaaaaattaaatagttattttatttgtggaatgttttattttaatttagtaaaattatatttaaattatttaggtgttttgttttttaagttaagtgtgtttgtttttaaatgtttttaaagtatttatattaattggttgtaaagaatgtatatatatggtaaaatatagaattgaattgagtagtattttaatttttttaaataattatttattataaattaatttattggttaattttataatttagtttatttaaaatatatgtttttgtgttgtttatttttaaattttttattaaagattttgttatggggtaataaagtgtatgaaaaggggggaaatgtgaaaggatttgggattatttgaattgtattttttttgtatttttagttttgtggtagttattagaaattattttttagtaaattgttttattttttagggtttgtttgtttgttttgttatggttttttgttttttgttagttgtgtagtgttttttgtgtgtttataatataaaatttaagttggttaaaataagagtttttggtatatatattttaattagaatatgaattttgggggtgagaattattttttattaggaaaagttttttattttaatttgtgagattagttattgaagttagttttgaagtttggtagttaaattttttatagaagatttgttttgatagggtaagtttaaggattagtaggtgggaattggaggtttttttttaaaaaattattttttttagttatttagatttagtttttttagtaggtttggttattaaatgaagtataaaaatgtaagttttaaggtttattttgattgtaaaataaatttttaagttataaggatatgtaggagtgagttaaggaatatgttttgattttttttttagtttttagagtggagttttatgagtttttgaagatttgttttgtattgttttgtttggtttttagtattgaagtatggggaagtggggggaagaatgtgtaataattgattgattttatattaagtaatgtaattttttttttttgtatattttattttttaaaaaaaataaataaataaaaattatttgtagttattatttgtagtgttttggttattagttaataatgtagttagtttagatatataaaaaaaaaagattattgaaatgatgatgatatgtaaattttttttgaaattattataagtaaatatttgaagtttggattaataaaattttatttgtgttattttatattgagttagtagaaagttgtgataatgaattttgtaatattttatgaatagatattttaattagggattaattttgtgattttattgtagaattattaaatttggagttgttaaattgttatttttgggtttatgggtttataaggattgaattggtagagtttttgtttgtgtttttgttagtgggtgggggaattgtttggttgtttttattttggatttttatgttatagtgttgggtagttttttttgtaggtagtgattttggttagaggttttttagggtttagttttttttaggagaggttgagatgtagggaaatggtatttaggttagaggtaggtttgtagttttttgttttgtttttgtgtttttgttaatttgataatgtttgtttttattttgatttttgtatttgtgtgaagtgggttttttggttgttggtgtattttggttagtgtggagagaggtaggtgttgagattgaaggggtttagggagttttggattttttttttttgtttttaaagtaattgtggtttttttatttatttggtggagttttttgagatttattttttttggtttgtttgtggtagagaagggggagtgtgttaaatgtttggtttgttgtgttgtggttgaaaatgtgaaaaagatttggtttgtttgggagagaaagggggagaattgggtagtagttatattagagttatttttttgtttttggtgggtagtaaattttttaagaatgtttgttttgttttttttagttttgtttagtttatttagtgttttttttttgtgattttaaattatattttagggtaattatttgtagtaagtaaataaatggttgggttagtatttttaggagaaagtgtggttaaatatggaaaagtggtttttgatggatgagaggtttgaatttagtttgtttttgaaatattttaggttaagagtttgtttgttttagaattatagaaaattgagggaaattgttgtttaggataggggtatgttggtgttgatgttttataaatgtttattgagttttaattaatggataagtattgaagggtggtttttgtatatagttttttaaagagaaaagttttttttatttatttatttttgttgttattgtgtttagatgagtttttaattttggtattgagatttttgaaagtaggtttatagtttttttagtatattgtggttttatagttttttaatttttgggtatttttgtggtaattttggagggagatttttttttgataaataaatgttttgggtttgaggttaggttggagatgttgttgtatagttagaggttgttaggttggaaaaatatgtttgaagtttagtatatagtaggtgtttaatagttagtgtaatgtagttttatttgagttttgtttatttgatggttgttgttttttatagtttttttttttttttgttttgtagataatggggaatggagattaattgttgtaaattggtgttggtgtgtgtgtaattaggtaagaattttttttttttgtttgggttattggatgggaggttgtgttatgtgagggtggtaagagggtattggttttgtggtgaggttttagtgaggggtgtttttttgaggggttagtttgggtaggaaggaaattagaattaaattgttagtggtttttttttgtggtggggtggtggattaggaagtagtggtgtgttgtgtattgaagttttttagtttattttttttggttggaattgttggtaattggggaggtgtagaaagagtatgttattttgttttgggttgttagagggtttgggggatggggatgttgttagtttttttttttaattgggtttttgttttttgttttttttttttttttggtttgttttgtttttttttttttttttgtttttggttttttttggttgtggtttgggatgtttttttttgtatgtggggtgggtgtgtgtgtggtttaggtgtgtagttggtggttgttgaatgttttttttttaaagattttgaaattaaaaaggttgagtttatggatttttttgagagttgaaaagaggtagttagtagtaagttttttttgtggtagtattttggtgttaatggtaaggttgggagggaagtgtaggttgtgtgttgggtatttgtttttgggattttgggttttgggtgaagtgtaagaaggtgaggttgttagatttgatgtgtttgttgtttgaatttagatattttgtttttgggtgggatgggaagtagttgttttagggatgttaatttttttttttaaattatattgtatttttgagatttaatattttttttttttttttgtttgttttttgtggtttgattttttgtgtatgttttagtaaattttggtgtttaggttggtgtggaaaagtggtttaatagtgatttttgttgtttgttatattttgttgtgtgtagtattattagggtttatttagttatttaggtttttagttatgttttatttagatttgtgggtgtgtggtttattgtgggaggtaagtaagggaaatttgagttggtgaaggtttgttttggttggttgggggaggggtggggggttgataatatttttgaagagttggagggtagttattgtgtttagtagtttagggtagaatggaggtttgtttttgttgatgtgaatttgtttgaagtattggttgttaggttttgggttttggtgatgttgttgtttgattggttggttttattttggaggaattgagggatattgttagaggaggtttataggtttatgtaaaaagttaaaaagtttttaatttatgttataggttttttttgaattgaaatttgttttatggggtggaggggggggtgtaagggatggaggagggaagatgtttttttttttaaatatatggaaaaaaattttttaaatttattgtttttttatttttttggttttgtagtaaataagtgtttagttttaggaggttattgatttttgataatgtgagtagataaagtttttttttttttatagtttttggtttttaattttttttttttggattaaagtgtaagaatataaatgtaatatgggatggaggggggtgatttgggattttggttaaaaaaataaattgtattattaagaagaaaataaaggttttgtattggagtttttttgtgaatttgagagaaaatgattatttgttgaaatgaagtgtttaaagtgatttagtgttttatgtttggatattgtattatattgttagttgttttgttgggttagttaaatgtttatttgtttgggattaattttatggggttaaatgggggtaatgtagagataatgttgtgtgatttttgttatttagattgtgttaaattttttttttgtttgataattggtagtaaaaataaattattagattgtagtatgtttgggatatggttaaaaattaagagtagtgatgatttttggggagaatgttttgtgtgggtttagttttggttttggttagattagaggagttttttaattttgttttgtgtggggtgggtttgtagttgttaagttgaggttgatattttttattgtgttgggagttagagagatgtaaaatgttttttttttttagtttttattttaggttttttagatatggggaatgtattttgaggataggtggagaagtttatggtaggatggggtttttgtaggtgagtaggaaatggttaagagtagaggagttttgtttgtgttagttataagttgtgtaggtgtttttggttgtttgtttttgataattagtatataaagaattagaaataatgaatgattgtttttttaattattatttttaggtttgtattgttttagtgtatgtgaaaggttttttttttatatttaatatgtttttttttattttttgattgaaaagaaaaattgttgtttaaatatgtttaatgttattaattaagaaaaggtatgtaatgggaagaaatgttgaaaattttgatttaattggtttttaaggaattagtagatgataaaaaaaaattatatgagtgggtaaagttatagtattgttgaaggatagagtatttatttttttttgattttaagttaatttatggaatatttaaagttttggttatagtttgtttgtaaaataaaaggatttattttttgtgtttttttaaagtttttttttgtttttaaagagaaaaaaagtttataatgatatatgatttttttaaaaggttgtgatagtttattatgttattttttttgtttttgtttttaatgttgtttaaaaatattatgtttttgttaaagattaaatgttttgtataggtagagtttatttttaagtagtttaggttttgttttttttttttagtgagttttattttttttggtatttattgggtggatgtttagtttggatagaattttgaaatgggggtagtatgagagtgattggagatttttaaaagttagaggtttgagagagggtggatgtagttagtagaagatggtgtagaagttagttgagaatgattttttagagtaaagagatttttttttggttttttttgttttgggggttttgaaaggaatttataaaatggtttttatttttaggaggaggatggattgatttttttttgttattggtttaaaaagttttagggtggtggttttgggttttgtgttgaaattggattgtattgtagtttttttggatttgatgtttggttttgtgttttgataaggggtgggtattttttttggttttttttaggaatgtattaattgttaaatagttttggtttagtggatgggttgaaagtgtttgatttaagttgttggtgtgtatagattttttttttttgggaggtgggttttatggtttgttgtggtatttttagttgtgatatatatttttatatgtggtagtagtttggttttaattttttttgaaggatttgggttaattttggtggttttggtggttgtagatttttttttgttgttttgtttttgtgttttttatttaattagtgaatgtttgtggagtatatattatgtggatttttaatgtattttttgaaagtaaataatatagttttttttgttgttatgaagggattttaattttaatatggatattagtgagattagtttagattgtttttagtaaaatgtaaaatggtggtgtgtggggtggtgattaaggttttgagttttgttagaaagaaggggatgtgtagagaaaggtggagaattttagttgtggttagtgtggaagggataggtgtttgttgaagggggtatgaggtttgaggaaaaagtaatgaaataggggtaaggagagttttttatttttttttttttgtttgatttttgttattttatttttttttttttttttttattttttgtgttaattaaatttgtagtttatttgaaaggtgttttgttgtgttgtggttttttatttttaggggaaattgtattagttgtttgaaagtagttagtttttgtggatttttgtttgtaaaagtggtttttataggttgtgttttttgttgttgatttggtatataaagttttttaaggttggtttggttgttattttttattgtttgttgttaatatatgtagtagttgttagagtggtttgggggaaaaggaaatgtataatgaaagtttatttgtgagtaggaatatattaatggaataatttgatgtttttttaattttatgtaaaaagttttgttgtttttttaatattgattgaatgggtaattaatggttttttatttaggtgaatattttgtaatttaagataggtaaaagataataagtttaaggtagaagataaaaggtttaattgtagtggtgtttgtttgttttttattttttagggtttttgattaggaaagtttttttttagaggagaaaaaggtaggagtgggagaatatatatttattattttggggttagattttattgtagtatttgattatttagtttagttttttgttattttgtttttttatttttagtttttttttttgtatttttttttttttttaatttttttaggatgattttttattattattgttattatggttttaataatttttttttttaaattttatattttttattttagtaattaatgaggttgttttttgatttaggaggagattttttttttttagaatttaatgtgtagagtttttgagaattaaagtagttggtaggggaggaagaaattaatagaaagggagagagtatatagaattgtgtgtgtatgttaaagagtgattaggaatgatagagttaatttttttgtgaggatttgatgggaagagtgtttaagattttattagtatgtttttaataggttgatattttaatttaaatttttagaagtaatatattatttgggttattataatgaggtgggtttttttttttttgttagttgatagtttttaaaatattattttgttagggaaataaaagttttattttagattataggtgggtatttttggatttaggtgatttatggttattatgataattaatgttgaatgttagttattagtatgtttgggagagagaaaatagaaagaagggagagtaaaagaaatagaaaagggagatggatataagttggagagggaagaaaagagaaaaagaggaagatagatgagtgtttaatttaattgttgtttaaaaaagtggtgggggggtgggattttatttagttttttgttattttttttttttttgatttggatatttatgtttaattttatattttatttttttttttttttttttaaatatatgtgttatattattttttttattttatttagtttggtaagtagttgttttttggagatttagtgatatttaggaaaattgtggtagtaatatgtaaatgtgaggaagtattaatagtatgtttgttgagtgattttagtaaatgtttttttttttaatttttttttttttttttttttaggttattgtgaggtggtaatttttattgttatttgaatattgtttttttaggtagttattttaaattttaaatggttgagtagttagagttgtgggttggaaaaatgggtattatttgtagggatttagagagggtggttgttgtttaatatatttatagatttttaatttagaaaataattttttttttttgataagttagagttttttaaattttatttaggaaatggggaaaaggatagttatagtgaagtttttaatttttgggttatttggttttatagttatgaggggtggtgggtagtggattgtttttagtttggtttgtatgtagagaaaagttagatattggagggggtggggtattttttgggtaggatgtaaggtttttatttgatttttgtgttttattaggagtttatatatttatgtttattatgtggttttaagttgagtttaggtgggttttgtttttgagttagtttgggtagggtaggatttttatttgtttaaggtttaatagtttagggagatgtttaattaagttattttttgggtgaattttgaagatagattttttttaaaagttagagattatttggttgagttttaggttagattgatatggagagtttggtggtatagtttaattgtttattgttatggttagagggattttgtataattaatattgaagagtgtgaaattaaataagattttaagattggtaattggtggtaaatattagtataaaatatggttgattttatgttatatattttttttttttagggtttttttttgaaagaataagtaagaaattttaattgagataatttttgatgttttttagatttaaaattttatgttggtattgggttttttttttttgttttatgtgagttatgtagtatttttagtttttttattaggattttattaatgttttttgtattggaaatttttgtgttagaggttgaatttatagtaatttttaaaattaattaagaagaatttagttagaggttatagtaatgttggaattataaaatgtataagatttatttttttttggttttttttttatttatgttgtttatgtttgtgtatttataagttttatgtatattaaatttttaaaattaattattattatgttatagagtttttattggatagtgttttttagtttttattatatatttttttttttttatgtagatttattatgttggtgttttgttatatagggggtttgagaagaatgttatttaattgttgttgttgtgagtgtgtaaagtgattaggagattaggagaatgttgaaatttttgttggaaaaatgtaaagaaaatttttattttgagttagttgtttatagagttagtgtgtgtgtgtgtgtgtgtgtttgtaatataaaatggatgtgaatatatatatataaatagatatggttttgtttttattttaatttgaattatttagataattgtttttatttattatttgattttaatgggtttatataaattaggatattttatttttttaggtatttaggttgttgttgatttttagtgtttttaatattttgtatatgttggtattatgaggagtagttatgtgtttttgggttttttaattattttggaggttgattgaggttttttatatatgtatatttgttgtgatgaaagttttattggtagagtggagttattagagtttttattaaaattttgtgggtttatgagagatgggtttagaaatttatatggttttgtggggttttttggttttttaaaataaggtattaatatttaagtttttaaaaatatttgtagttttggggtttgaattttgaaaaataaggagtgaggggttgtgtatattaattatagtggagattttttttattttttaatgtgatggagtttttttatgaaatgaagttttaaggggtatggtattgtggggattatagttattttgaggtttaaaagaagaaattggaatatgattagtaaatatatttagtagaaaagagttggatttttattgatttagttataggttattggttggtagtgtaatgggaggaaatatttattttatatatatattttatgattttgggggaattagaggaaatttaataagaaaatggttagaaatatttaaaatttttatttaaaagatttaagtaaattagagttttattagattaaaaattattataaatgtaagagtattgtttttagtgaaatgttgtggggtttgagaaggagattttttgttaaatttttgggataaaatgtgttatttaagtattagataatgagtagaatgtaaattaatttaattttttttattaataggttgttagtgtaatgtgtataatttagtgataagattgtaggatttaatatagttggatgtatgagttttagttaatgtagatttgttatatgaggatgtgttttattttgagtaggtgtttgtatgtgtggaatggggtaaagtggaataaaaggttaaaagtagaaatgttgatttaaagtttattatgaagaaattttttttttgtagttaaattatttttaaagtgggatgatattggtgaagaaagattgaaaaataatttttatgtgtgtttttggattgtaagtttaaaatggggaggagttgtagatagggtttgggggtggttagggtaaaggagagatatataagttgtaaatatatttgtagtttgttttatttattttgttttatattgaataagttttttaattttgtgaataaggataaggagggagtgttttaaagatattttatgttggtattgtaaattattgattgtaatgttaaataaatatatatttagagatgataatattaattttatagtaaaataattgtttatgtagaaatttagaggagattagtttgttttttttagttgatttatgttgggggataaaaggatttttaaaaattattttgaatatgtttggatttttttttttaatttttttggaaattaaatttgtttggaaatagtgttataaagagttgatgtttttaaaggtgattttttttgttttatataaataaggttttgtttttgttagttgagtgtagttttaggttttttgtttttagtttatatatattttttttgtttgtttggattttaatggtttaagatagttttgagtttattgggaaaagaaaatgattgttaaaaattatttttgaaattggttatttggtaatatttttaattgtatggaaatttattaaggtatattttatatataattagtttaaggttgttgattttataggttttatggatttaaatttgattgataataaagtaaataagagagttgaatttaaagtgtggtttttttgggttaggatgagtttaatatagtgtataaggaatttgaaagatttaggatatgtgttttaattaatgttaagtagaatggataagtttttagtattttgaaaatgttgggttagggttttttttttattgtgtgttttttgtttggggattaataagtattatagagaatgtgatttgaggtgattttttatttttgtataaatttagagtgaattattaaatagttgtttgtttaaagttaaggtaatttttttttgatgggtttatttgttttttgatttttaatttattagtttgtttttttagggttttgttttttttgtaattaaagtttttttagattagtgtagtatttatttgataggttgtttggaaaatttaagattggagaggtgatttgttgttgttttttaaattttttagttttaagtaatgtgttttttttttatatggggtgggggattggaaatggatgtagtgagatataaagagtgggtgttttgttgatttttgtatttttttttttttgattattttattttttttttttaagtttttgatttttagttttatttttttatttttgggtttgtattaaaagttggattgttttgggttgggtaggagttgaatttttgggagtttgtttgtgtagatttagtgtgtatggtgaggtagtagtttggttttgtattgttgataggtgtaggtaggatagtttttttattgtggtttggggtgttttgattggtgtggagttatgttagttgtatttggagaagggtttgggaggaggtggaggtggagagggttggggagggttgtggtggagtgatgttttggtattaggaagtttgtttttggttttaagatgttaggttaatagggaagtgtggagttgtagatttggtttgttgtttgtttgggtgtttggagttgagttgtggtaaggtttggtttttgtttgattgtttgaggggtgtgtgtgtgtgtgttgtggagggtgtgtttagagggttgtgttgtggttgtagtggttgttgttgttgtaggggatttaatattatttatttgtttttgttatttttgatatttttttgttagggttgttgtgtggggggggggtgggtagagtgtggttggtgttagttttttttattggaggggtttttgggggagggagggagagaagaagggggtttttgtttatttttgttttgttttggagtttggaagtttgttttttaaagatgttttgagtggtgtttttttgtttatattttatgtttttgtttgtttgttgattttttgtttttggatttttttgtttgagttttttggaggagatgggggtagtttggtttgagaatttggtgggggttgtgttttttggttttttttgtagtggggaaattttgtgtttagagtgtgatttggagtgggtagtggtggttatgggggtttggtggggtagtagttaaggattagtagagtgttgtgtttttttgtttatgaattgtatgaaaggtttgttttatttggagtattgagtagtggggattaagttgttggttgtttttttatttttttgttattatttttagttgttagttatggttttggttttggtttttggttagttttggttgttggatttttttaagtataggttggaggtgtatattatttttgatatttttagtttggaggttgtaggtaaggtgttgtgttgttttgtagatatttttgtttagttgttttgtgttatttgtttttttttgttttaaggaagttagtttttttggggggaggtgtggtgggagtggttgtttgtttggttttttgtagaatttttgggagttggaattttgattattttgtatttttttagtttttttttgattggtttggtttttggggtgttaagggtgtgagtaattttgttgttttttttatttgtattttggttttttttttgttttttgggttataaaaattttagtattttgatttgaggatttttagaggttgttgatttttgtttttgttttttttttggtttttagtttttgaggagttttatttgttaggaaattgtttgaaattatttagaaatgttttttgtgaagaggtattttttttttttttttgggaaagggttggtgaattttggtgtttaattgaatttttatatttttttttagtttttttaaattgtatggaaatttgagttttttgtgagggggaggggggtttgtaaattatgtgtgtgtgtgtgttttaggagatttggtgtgtttgtgtagaggtgtataaatatatttgaaagtataggttataaaagtgaatgtgttgttgtagtgagataaatatgtaaataaaatgtgtggtgttgggggaggggaggaaatggggtgtggatatttatatttgtgtttgtatattttataggtgtagtgttttttgtggtttggagttgttgtgtgtatttttttttggtgttaggtagtttagtttttttatggtttttgttgttggtttagttggtgtttgtgttgtaggtgggtatgttgatgggaaagtgtgtgtgttttgtttttagagaaagataaaagttagtaggggaagaatgaggatgtgggtgttgaggatttgtttaagaagaagtggtaaaggtggtagtggatttattttattagttagtagttttaggagttggaggttattttttagaggaattgttatttggatatgtttatatgtgaagaaattgttgtgtggattaattttatggaagtttgagtttgggtaggagttagtatggagtttgggagggatggggggaggatgttgtggaggtataggttaagtagattaggagagaatgtggaaggtagtgttgtttgggagggtgttggtggggtgtagttttgtaaaggtagaaggttttgtggtggtttggttgtgagattatagttttttttttgaggttgataggattgttgttttggtttaggtttttagagtggtattggtttattgttttgttattttgtgattttatgagttgggttgtatgggtaattttttgtataggatattgtgtttttggtttgtagttgttagagtagagttaataaaatttttattaggttaagagttgtgaataggttttaatttgtgagtttttaataaggaaaatttgttagagatatggaagagttggttttttttgggaaatttttgttttggttttggtttagtttttttttttttgggtttgtgttttttatattttttttatggttgttttggttatttaggttttttttatatattttattttttagttttgtgatttttgggagtaaagttttaatatataattattagtttttttagaaggagaaagaaaaaaagaagaaagatttttttgtttggtttatttatttttttttaggagttgaattttggaaattgaaatttatatttttttttttaaattataattatagttttgtaaaaagggtttattttaattttgtagtaaatttgtattttatggattggtaaaaatgagtttaaataaataatttaatagtaatgttttggtttatgttggttggtggaagattttaaatttgttaggattttggaagtagaaaatagaattaagtaaattaagtggtatttagaggttttgttgttaaaaaaaaaaaattaagtgttttgggtagaaaaaataaagtttttggttagagtagagtaaataaaaagaagaaaataatgataaaaagaataaagattaaaatgtttttttaaattagagggaatgaagatattttttgggtggtatttgtgtaaggtatgaggttatgttggtggataaaaggttgggaagaagttgaaaatggttttagtttaattgtttagagttagagttgggttttgggtggtgtggttttgagtaaggttagttttttattagtttttttgtatattaagggaatgggttttttatgtattttttttgtttgagtaaagtttagatggtttagggtagaaatggtaagtaattaaagatagagtttatgggttttttgggattttttgaaaatgtttttttattttgtttgttattttgtagttttattttagtgttttgtagttgtggtgttgggttttttttgtagttgtttttttttttagggtggttgtttgttgagttaagtgggagtgaggtgtgttttttatagtagttgggtgtaaagaggaagggggataaaaaggaaattaagaatgaaaggaaaaagagaaaaagtggattatatggttgggtttggtggagatgtgtaatgtgaaatattattggtgttagtttggatattttaggttaggtttttttttaatatataaaagttgttgtttggggtgatagggaggtttgatgtggattgggattggggttgtggttgggttattggatatgggtggaagttggttggtttgggtggttgtttgtaaagttaaatgatttggttgggtttggtgtgtggataggtttgtggtgggtttagggtaaagaagaggtagagtgaaagaagggggaatttttaaaattattttttttgggtttttggagtttaatatgttaagtttttggagttaatgagttgatgaagaggtggttttttgttttttatttggttgttttgttaggtgagaaagagtgttggtggtttagtttttgttaagggagtatgtattagggggtgggggatgatagtggaggttagggaaggaagggaggaattgtgtgggagaaagagtgattttttagtgtttttttagttttttttttttatttgtgggtttgtggttttggaatggaagtaagtttgtaaggtgttttgggaagggttggaaaagtttgttgttttgtgtttgttttatattaagtgtttttggatttggagaaatgtttggttgagtgattaaattgtttgtaggtttttatgtgtttggttgaggtttgtggtgtagttttgagttttagtttgtaggttagagtagattaggttttttgtgtttggtggagatttgggttagtaattgaaagttggttttggtattttggtgtgtagggtggtgtagtgaagtgaggttagggtgtgtgagtgtgttagtgtgtgtgttgggggaaggtgggggttggtttttgatggaagttttagtaatttgtattgtggtatttgtttgtttttttgttttaattgtttttaggtttggtttaagaattgttgggttaaatggagaaagagggagtgtaattagtaggttgagttatgtaagaatggttttgggttgtagtttaatgggtttatgtagttttatgatgatatgtatttaggttatttttataataattgggttgttaagggttttatatttgtttttttatttattaagagtttttttttttttaattttatgaatgttaattttttgttattatagagtatgttttttttatttaattttattttgtttatgagtatgttgtttagtatggtgtttttagtagtgataggtgttttgggttttagttttaatagtttgaataatttgaataatttgagtagtttgttgttgaattttgtggtgttgatgtttgtttgtttttatgtgttgttgatttttttgtatgtttatagggatatgtgtaatttgagtttggttagtttgagattgaaagtaaagtagtattttagttttggttatgttagtgtgtagaatttggtttttaatttgagtgtttgttagtatgtagtggattggtttgtgtgagttgtatttatagtgttgggattttaggattttgttggatggggtaattttgtttttgaaagattgggaattatgttagaaggttgtgggtattaaagaaagggagagaaagagaagttatatagagaaaaggaaattattgaattaaagagagagtttttttgattttaaagggatgtttttagtgtttgatattttttattataagtatttttaatagttgtaaggatatatatataaataaatgtttgattggatatgatattttaatattattataagtttgttattttttaagtttagtattgttaatatttaaatgattgaaaggatgtatatatattgaaatgttaaattaattttataaaagtagttgttagtaatattataatagtgtttttaaaggttaggttttaaaataaagtatgttatatagaagtgattaggattttttgtttgtgagtaagggagtgtatatattaaatgttatattgtatgtttttaatatattattattattataaaaaatgtgtgaatattagttttagaatagtttttttggtggatgtaatgatgtttttgaaattgttatgtataatttattttgtgtataatattttgtataatattattgttttattttttagtaaatatgaaataaatgtgttttattttatgggagtaaaatatattgtatataaattggtttggattttttttttttttttttgttattaatttggttaggatattttagttattgttttttaaataaattagttttttttgtttgtttagttaaatatataaggtagtagtttttatttaaatttggtagaaataaatgatagttatttattagaaattaaaaagaaaaaaaaaggtatttttgggggggaaaagggttataaaatttaattttgtttttttaatttttttttggtttaaatttagaggattttattatggttagtaaataatatgaaaaagaaaaaagaagaaagaaatttagtaagtttattagtttaaaatgatttttaagtttatttttttatggggaaatttatatttttagtaaattgttttggagaaatatttgtgtatgtatatatgtatagtttatatgtattttttttaggaggaatatatttataataaatttatagggaaatatttttagtttaaaatatttaggtttttatgtttatttttaggtttaagtagagagattttttatgttatattgtattattatttttaaattttttggagatattaaaagaaataaagatgatttttaataattatagttttttagttttttaaagaatttaggggttgagaggttagagtggagttttttgagttttgttgagtaatatgtagttgaggtaaaggttatgtttttggtgttttgttttaaataatattgatttattaattttaaatttgtttgtttttgaaattatataggattatagtttgtaaattgtaggataatgaagtaaattaagatgaattatagttttggttttttttgttattttttgatatttaaatagggaatgagtttggtgtgagtgtttaaatgaattttaagtatttgatttttttttatttgtgatttttagttttaaaaaaatgtgaaatttgattttataataaatagaaataaatattatttagttttagagaatttatttttatggtgttaggagggttgttgtggaggtggggggagggatgtgttgagattttttgttatgtttgttaattttttgtataattaaagtgggtgagaataaatattatgttggggaatttagagtaaaaagtaattgttgattttttggagttgataatattattgtttttttgttttagttgtttttatttgaatgaaattttatttagaagtttttggagtttgaatattgagtttttgttttgtaagaaattgttgttgttatttaaagagattgtagataatgtttttgatttaagattagtgtttaatgtatattttttttttttttaaagttttgtttttgatttgtggagggattatgtagtagtggggggtagataaaagttttttggatgagggttattttttattatgttgtttatttgagagtagtggagaggaaaatggtttttatgggtggattttggtttttggagttgtagggtttagtggttttggtttttttgttttttagtttggtagggggtggggagggttaaagggtggaggggaaggaaggagttagaagaggggatttggggatgggggttggaagtgttaatgagatttgtttggaggatttaggttttttgtaggttggtgagtgatttgggagttttgggtaaaagaggtgtattttggtttagtttggttgttgaattagaataatgtgaggatattaattaatttgtaggaaataaaaaatggaagttgaggtttaggaagagttgttatttttttgatttgagtggtgtaggttgggggtggagatttgggatttaagagaggttattttttttattttagttttttttttttggatttttaaaaggaataattttatttttttttttgttttttttataatttttatttttgttagtttgtaggttgtttgtttttttttgtattttttttttttatttagtgagagaaatttagtttttagagt

SEQ ID NO: 966 - DNA, 20 bp, Artificial Sequence
  chemically treated genomic DNA (Homo sapiens)
ggagtggaggaaattgagat

SEQ ID NO: 967 - DNA, 22 bp, Artificial Sequence
  chemically treated genomic DNA (Homo sapiens)
ccacacaacaaatactcaaaac

SEQ ID NO: 968 - DNA, 33 bp, Artificial Sequence
  chemically treated genomic DNA (Homo sapiens)
tgggtgtttgtaatttttgttttgtgttaggtt

SEQ ID NO: 969 - DNA, 22 bp, Artificial Sequence
  chemically treated genomic DNA (Homo sapiens)
gtaggggagggaagtagatgtt

SEQ ID NO: 970 - DNA, 24 bp, Artificial Sequence
  chemically treated genomic DNA (Homo sapiens)
ttctaatcctcctttccacaataa

SEQ ID NO: 971 - DNA, 20 bp, Artificial Sequence
  chemically treated genomic DNA (Homo sapiens)
agtcggagtcgggagagcga

SEQ ID NO: 972 - DNA, 27 bp, Artificial Sequence
  chemically treated genomic DNA (Homo sapiens)
agttggagttgggagagtgaaaggaga

SEQ ID NO: 973 - DNA, 144 bp, Artificial Sequence
  chemically treated genomic DNA (Homo sapiens)
gtaggggagggaagtagatgttagcgggtcgaagagtcgggagtcggagtcgggagagcgaaaggagaggggatttggcggggtatttaggagttaatcgaggagtaggagtacggatttttattgtggaaaggaggattagaa

SEQ ID NO: 974 - DNA, 22 bp, Artificial Sequence
  chemically treated genomic DNA (Homo sapiens)
aacatctacttccctcccctac

SEQ ID NO: 975 - DNA, 32 bp, Artificial Sequence
  chemically treated genomic DNA (Homo sapiens)
gttagtagagattttattaaattttattgtat

SEQ ID NO: 976 - DNA, 14 bp, Artificial Sequence
  chemically treated genomic DNA (Homo sapiens)
ttcggttgcgcggt

SEQ ID NO: 977 - DNA, 16 bp, Artificial Sequence
  chemically treated genomic DNA (Homo sapiens)
tttggttgtgtggttg

SEQ ID NO: 978 - DNA, 164 bp, Artificial Sequence
  chemically treated genomic DNA (Homo sapiens)
gttagtagagattttattaaattttattgtatagtggcgcgcgggcggtcggtcgagttcggttgcgcggttggcgatttaggagcgagtatagcgttcgggcgagcgtcggggggagcgagtaggggcgacgagaaacgaggtaggggagggaagtagatgtt

SEQ ID NO: 979 - DNA, 84 bp, Artificial Sequence
  chemically treated genomic DNA (Homo sapiens)
taagagtaataatggatggatgatggatagatgaatggatgaagaaagaaaggatgagtgagagaaaggaagggagatgggagg

SEQ ID NO: 980 - DNA, 25 bp, Artificial Sequence
  chemically treated genomic DNA (Homo sapiens)
taagagtaataatggatggatgatg

SEQ ID NO: 981 - DNA, 17 bp, Artificial Sequence
  chemically treated genomic DNA (Homo sapiens)
cctcccatctcccttcc

SEQ ID NO: 982 - DNA, 25 bp, Artificial Sequence
  chemically treated genomic DNA (Homo sapiens)
atggatgaagaaagaaaggatgagt

SEQ ID NO: 983 - DNA, 30 bp, Artificial Sequence
  chemically treated genomic DNA (Homo sapiens)
tttttgtaaagatagttttgatttaagtat

SEQ ID NO: 984 - DNA, 21 bp, Artificial Sequence
  chemically treated genomic DNA (Homo sapiens)
caaactttctccctaaaaacc

SEQ ID NO: 985 - DNA, 17 bp, Artificial Sequence
  chemically treated genomic DNA (Homo sapiens)
cgccgccaacacgatcg

SEQ ID NO: 986 - DNA, 27 bp, Artificial Sequence
  chemically treated genomic DNA (Homo sapiens)
caccaccaacacaatcaaccctaacac

SEQ ID NO: 987 - DNA, 29 bp, Artificial Sequence
  chemically treated genomic DNA (Homo sapiens)
tgattattatgtttaaggatatttagttg

SEQ ID NO: 988 - DNA, 28 bp, Artificial Sequence
  chemically treated genomic DNA (Homo sapiens)
caataactctaaaaaaaacctttaaatc

SEQ ID NO: 989 - DNA, 20 bp, Artificial Sequence
  chemically treated genomic DNA (Homo sapiens)
cgctccccgcgaatacgacg

SEQ ID NO: 990 - DNA, 29 bp, Artificial Sequence
  chemically treated genomic DNA (Homo sapiens)
taaacccactccccacaaatacaacaaac

SEQ ID NO: 991 - DNA, 19 bp, Artificial Sequence
  chemically treated genomic DNA (Homo sapiens)
catccctacacttccaaac

SEQ ID NO: 992 - DNA, 21 bp, Artificial Sequence
  chemically treated genomic DNA (Homo sapiens)
ggagttgttaggagaaaagtt

SEQ ID NO: 993 - DNA, 21 bp, Artificial Sequence
  chemically treated genomic DNA (Homo sapiens)
cgaacacccaaccgacaaacg

SEQ ID NO: 994 - DNA, 26 bp, Artificial Sequence
  chemically treated genomic DNA (Homo sapiens)
caaacacccaaccaacaaacatctca

SEQ ID NO: 995 - DNA, 20 bp, Artificial Sequence
  chemically treated genomic DNA (Homo sapiens)
ttgtagggtttttttgggtt

SEQ ID NO: 996 - DNA, 23 bp, Artificial Sequence
  chemically treated genomic DNA (Homo sapiens)
ctcaaaacccttaaaaacataaa

SEQ ID NO: 997 - DNA, 21 bp, Artificial Sequence
  chemically treated genomic DNA (Homo sapiens)
ataaccacactacgcgcctcc

SEQ ID NO: 998 - DNA, 25 bp, Artificial Sequence
  chemically treated genomic DNA (Homo sapiens)
ataaccacactacacacctcccaca

SEQ ID NO: 999 - DNA, 20 bp, Artificial Sequence
  chemically treated genomic DNA (Homo sapiens)
ggtgttagggtttaggggtt

SEQ ID NO: 1000 - DNA, 26 bp, Artificial Sequence
  chemically treated genomic DNA (Homo sapiens)
ccaaatatttacctaacactcaaata

SEQ ID NO: 1001 - DNA, 25 bp, Artificial Sequence
  chemically treated genomic DNA (Homo sapiens)
aactattttctatcgaaaccgcccg

SEQ ID NO: 1002 - DNA, 30 bp, Artificial Sequence
  chemically treated genomic DNA (Homo sapiens)
aactattttctatcaaaaccacccacctct

SEQ ID NO: 1003 - DNA, 22 bp, Artificial Sequence
  chemically treated genomic DNA (Homo sapiens)
gtaggggagggaagtagatgtt

SEQ ID NO: 1004 - DNA, 24 bp, Artificial Sequence
  chemically treated genomic DNA (Homo sapiens)
ttctaatcctcctttccacaataa

SEQ ID NO: 1005 - DNA, 20 bp, Artificial Sequence
  chemically treated genomic DNA (Homo sapiens)
agtcggagtcgggagagcga

SEQ ID NO: 1006 - DNA, 27 bp, Artificial Sequence
  chemically treated genomic DNA (Homo sapiens)
agttggagttgggagagtgaaaggaga
